(19) United States
(12) Patent Application Publication
(10) Pub. No.: US 2022/0111065 A1
(43) Pub. Date: Apr. 14, 2022

(54) MOLECULAR ADJUVANT

(71) Applicants: ADC THERAPEUTICS SA, Epalinges (CH); MEDIMMUNE LIMITED, Cambridge (GB)

(72) Inventors: Patrick Hendrikus Cornelis VAN BERKEL, London (GB); Jay Marshall FEINGOLD, Murray Hill, NJ (US); Jens WUERTHNER, Epalinges (CH); James ADAMS, Murray Hill, NJ (US)

(21) Appl. No.: 17/057,486

(22) PCT Filed: May 22, 2019
(86) PCT No.: PCT/EP2019/063262

§ 371 Date: Nov. 20, 2020

(30) Foreign Application Priority Data
May 23, 2018 (GB) 1808507.6
Aug. 10, 2018 (GB) 1813067.4
Nov. 7, 2018 (GB) 1818152.9

(51) Int. Cl. A61K 47/68; A61K 47/54; A61K 47/55; A61K 45/06; A61K 35/17; A61K 35/15; A61K 39/39; A61K 39/00; A61P 35/00

(52) U.S. Cl. CPC A61K 47/6849; A61K 47/545; A61K 47/55; A61K 45/06; A61P 35/00; A61K 35/15; A61K 39/39; A61K 39/0011; A61K 35/17

(57) ABSTRACT

The present disclosure relates to therapies for the treatment of a disorders characterized by a disorder-associated antigen (DAA); vaccination methods are disclosed. In particular, the disclosure describes anti-CD25 ADC molecular adjuvants for use in inducing or enhancing a subject's immune response against a DAA, allowing for treatment of the disorder characterized by the DAA. Also disclosed are dosage regiments for the treatment of solid tumours with an AThe present disclosure relates to the treatment of pathological conditions, such as cancer, with anti-CD25 ADCs.

[0001] This application claims priority from: United Kingdom application GB1808507.6, filed on 23 May 2018; United Kingdom application GB1813067.4, filed on 10 Aug. 2018; and United Kingdom application GB1818152.9, filed on 7 Nov. 2018. The disclosure of these three priority document is incorporated by reference into the present application for all purposes.

### FIELD

[0002] The present disclosure relates to therapies for the treatment of a disorders characterized by a disorder-associated antigen (DAA); vaccination methods are disclosed. In particular, the disclosure describes a molecular adjuvant for use in inducing or enhancing a subject's immune response against a DAA, allowing for treatment of the disorder characterized by the DAA.

### BACKGROUND

[0003] Vaccines

[0004] A vaccine is a biological preparation that induces acquired immunity to a particular disease, providing protection (prophylactic vaccine) or aiding treatment (therapeutic vaccine).

[0005] Vaccines typically have a basic composition that includes two principal components: one or more antigens derived from a causal agent (such as a neoplastic cell or a pathogenic microorganism), responsible for the specificity, and an adjuvant to enhance the immunogenicity and protective efficacy of the vaccine (see Schijns et al. 2011, Exp. Rev. Vac. 10:4, pp. 539-550).

[0006] Over several decades, studies of vaccines have evolved towards the search for well-characterized and highly-purified antigens, such as recombinant proteins and peptides; over the last several years, this search has included the introduction of defined, potent and safer adjuvants for a new generation of vaccines (Garcon et al. 2017, Hum. Vac. & Imm. 13:1, pp. 19-33). Aluminum salts were the first substances used as vaccine adjuvants, and they were the only approved adjuvants in preventive human vaccines for decades. However, owing to their relatively weak capacity to induce cellular immunity and an emerging debate regarding possible links between aluminum and certain severe post-vaccination reactions (Batista-Duharte et al., Toxicol. Lett. 10 (2) (2011) 97-105; Bonam et al., Trends Pharmacol. Sci. (2017)) the search for alternative adjuvants has become an area of intense investigation. For many years, the search for new adjuvants has been active but empirical, and as a consequence a growing number of new substances with documented adjuvant activity have been reported in the literature. However, owing to safety concerns, very few adjuvants, such as MF59 and ASO3, have been licensed for use in human vaccines (Garcon et al. 2017, ibid.; Bonam et al., 2017, ibid.). For this reason, there has been an increasing trend towards the rational design of vaccines using defined molecules with well-characterized cellular and molecular mechanisms of action (so-called “Molecular adjuvants”).

[0007] Modulating Regulatory Immune Cells

[0008] One of the current directions of the molecular adjuvant approach is the targeting of immune regulatory networks (Davies et al., Methods Mol. Biol. 1494 (2017) 107-125). Growing knowledge of the immune system and how it is regulated has shown that there a number of sub-populations of immune cells which have a regulatory function in modulating immune system responses. For example, myeloid-derived suppressor cells (MDSCs) and mesenchymal stromal cells (MSCs) have both been reported to exert negative regulation of immune responses, including effector T-cell responses, and implicated in assisting tumour growth (Bianchi et al. 2011, Histol Histopathol. July; 26(7):941-51). Similarly, Type II NKT cells have been reported as having an important role in down-regulating tumour immunosurveillance in a number of tissues (Terabe et al., Nat Immunol 2000; 1:515-20; Terabe et al., J Exp Med 2005; 202:1627-33). Finally, some studies have shown that depletion of Tregs prior to vaccination in murine models can enhance immune responses to certain vaccines, suggesting that Tregs can interfere with the generation of vaccine-induced immunity (Klages et al., Cancer Res. 70 (20) (2010) 7788-7799; Fisher et al. Immun. Inflamm. Dis. 5 (1) (2016) 16-28).

[0009] Molecular Adjuvants

[0010] Accordingly, a number of different treatment strategies targeted at immune regulation have been proposed or examined for impact on clinical outcome. Supported by growing knowledge of the immune system, many of these strategies utilise molecular adjuvants to improve vaccine efficacy. These molecular adjuvants are typically defined molecules with characterized cellular and molecular mechanisms that interact with the immune system with the aim of improving vaccination-associated clinical outcomes. Example treatment strategies include: metronomic chemotherapy, CD25 antibodies, CTLA4 antibodies, anti-GITR antibodies, anti-OX40, PD1 pathway modulation, Indoleamine 2,3-dioxygenase inhibitors, anti-LAG3, CCR4 antagonists, anti-FOXP3, blockade of TGFβ, Listeriolysin O, blockade of adenosine-mediated immune suppression, anti-angiogenic molecules, folate receptor 4 antibodies, nicotinamide adenine dinucleotide, TLR modulation, and ICOS antibodies (reviewed in Batista-Duharte et al., Pharmacological Research 129 (2018) 237-250).

[0011] However, a number of studies have identified cancer models where Treg modulation has no benefit (murine pancreatic carcinoma model—Keenan et al., Gastroenterology 146 (7) (2014) 1784-1794) or highlighted the risks of regulatory immune cell modulation such as disruption of immune tolerance, and induction of inflammatory disorders or autoimmune processes (Bayry et al., Virus disease 25 (1) (2014) 18-25; van Elsas et al., Exp. Med. 194(4) (2001) 481-489). These risks are in part due to the fact that the highly complex mechanisms that control regulatory immune cells are not yet well-defined (Berod et al., Microbiol. Biotechnol. 5 (2) (2012)260-269), and in part due the use of modulators that target Treg signal molecules (such as receptors or other proteins) that form parts of signalling pathways common to both Tregs and effector T cells (Teffs). Certainly, Tregs and activated T-cells share several features and receptors, which explains the weak selectivity of some immunomodulators intended for specific Treg inhibition (Pere et al., Oncoimmunology 1 (3) (2012) 326-333; Ustun et al., Blood 118 (19) (2011) 5084-5095).

[0012] As a consequence, more recent studies have proposed increasingly focussed strategies designed to inhibit regulatory immune cell function rather than their deletion by using combined checkpoint inhibition to improve efficacy and safety (Pere et al. ibid.; Ustun et al. ibid.; Wang et al., Cell Res. 27 (1) (2017) 11-37); specific and effective molecular adjuvants are an essential part of these strategies.

### SUMMARY

[0013] The present authors have studied the effects of administering CD25-ADCs in a number of different disease models, including models with CD25-ve tumor target cells. Their observations indicated an efficacy beyond what was expected for either of direct target cell killing by the ADC combined with the so-called ‘bystander effect’ indirect cell killing, as described in WO/2016/083468. Building on these observations, the present authors reasoned that increased efficacy of ADCx25 arose from targeted cell-killing of AD25+ve regulatory immune cells, such as Tregs. That is, the present authors have determined that the CD25-ADCs described herein have applications as powerful and specific molecular adjuvants.

[0014] The therapies described herein include those that induce or enhance a subject's immune response. In particular, in certain aspects the therapies include treating a disorder by inducing or enhancing the immune response of a subject against an antigen associated with the disorder. In some aspects the therapies described herein enhance or induce an immune response by targeting immune regulatory cells with a CD25-ADC. The targeting of immune regulatory cells in this manner allows for a reduction in the negative regulation of the subject's immune responses to an existing or newly presented antigen.

[0015] In some aspects the therapies described herein enhance or induce an immune response by directly killing target cells through cytotoxic ADC binding to the target cells and/or, through a ‘bystander effect’, indirectly killing target cells in the proximity of cells that are directly bound by the cytotoxic ADC (see, for example, WO/2016/083468). Without wishing to be bound by theory, it is believed that this killing of target cells causes the release of target antigens, ‘stranger signals’, ‘neo-epitopes’, and/or ‘danger signals’ into the extracellular environment where they can interact with and further stimulate a subject's immune system (see, for example, Virgil EJC Schijns & Ed C Lavelle (2011) Expert Review of Vaccines, 10:4, 539-550).

[0016] Thus, in one aspect, the present disclosure provides a method of inducing or enhancing an immune response in a subject, the method comprising the step of administering a CD25-ADC to the subject. The immune response may be disorder-associated antigen (DAA) specific immune response, such as a CD8+ T cell response, a CD4+ T cell response, an antibody response, or a memory cell response.

[0017] In another aspect, the present disclosure provides a method of treating or preventing a disorder a subject, wherein the disorder is characterized by a disorder-associated antigen (DAA), the method comprising administering a CD25-ADC to the subject.

[0018] In some embodiments the CD25-ADC is administered in combination with a DAA. The DAA may be administered as part of a vaccine composition, optionally wherein the CD25-ADC is also part of the same vaccine composition.

[0019] The CD25-ADC may administered in combination with the DAA or vaccine compostion, although they may be administered comcomitantly. Preferably, the CD25-ADC is administered before the DAA or vaccine composition. The immune-suppressive activity or size of a population of regulatory immune cells in the subject may be reduced by at least 90% before the DAA or vaccine composition is administered. Preferably the regulatory immune cells are Treg cells.

[0020] The DAA may be tumour-associated antigen (TAA) or a pathogen-associated antigen (PAA). The PAA is derived from a pathogen selected from the group consisting of a virus, bacterium, fungus, protozoa, parasite, prion protein, or protein aggregate.

[0021] In some cases the subject has, is suspected of having, has been diagnosed with, or is at risk of, a disorder characterized by a disorder-associated antigen (DAA). In some cases the subject has been selected for treatment on the basis that the subject has, is suspected of having, has been diagnosed with, or is at risk of, a disorder characterized by a disorder-associated antigen (DAA).

[0022] The disorder may be a proliferative disorder such as cancer.

[0023] In some cases, the proliferative disorder or cancer is a solid tumour, which may comprise or consist of CD25-ve neoplastic cells. The solid tumour may be associated with CD25+ve infiltrating cells, in some cases high levels of CD25+ve infiltrating cells. In some cases the solid tumour is selected from the group consisting of pancreatic cancer, breast cancer (including triple negative breast cancer), colorectal cancer, gastric and oesophageal cancer, melanoma, non-small cell lung cancer, ovarian cancer, hepatocellular carcinoma, renal cell carcinoma, bladder, and head and neck cancer.

[0024] In some cases the proliferative disorder or cancer is lymphoma or leukaemia, such as Hodgkin's Lymphoma; non-Hodgkin's, including diffuse large B-cell lymphoma (DLBCL), follicular lymphoma, (FL), Mantle Cell lymphoma (MCL), chronic lymphatic lymphoma (CLL) Marginal Zone B-cell lymphoma (MZBL); and leukemias, including Hairy cell leukemia (HCL), Hairy cell leukemia variant (HCL-v), Acute Myeloid Leukaemia (AML), and Acute Lymphoblastic Leukaemia (ALL) such as Philadelphia chromosome-positive ALL (Ph+ALL) or Philadelphia chromosome-negative ALL (Ph-ALL). The proliferative disorder or cancermay be associated with elevated levels of regulatory immune cells, such as Treg cells.

[0025] The subject may be selected for treatment on the basis that the subject has received an adoptive cell transfer, such as a bone marrow transplant. The adoptive cell transfer may be an autologous cell transfer or an allogenic cell transfer, and may be a stem cell transfer and/or an immune cell transfer. In some cases, the subject received the adoptive cell transfer at least 3 months prior to the administration of the CD25-ADC, such as at least 6 months, at least 12 months, at least 18 months, or at least 24 months prior to the administration of the CD25-ADC.

[0026] The CD25-ADC may administered in combination with a cell therapy. Preferably, the CD25-ADC is administered before the cell therapy, such as at least 7 days before the cell therapy. The immune-suppressive activity or size of a population of regulatory immune cells in the subject may be reduced by at least 90% before the cell therapy is administered. Preferably the regulatory immune cells are Treg cells. The cell therapy may comprise the administration of autologous cells, allogenic cells, stem cells, and/or immune cells.

[0027] Preferably, the administered cells are immune cells such as T-cells, Natural Killer (NK) cells, Natural Killer T-cell (NKT), Lymphokine-activated Killer (LAK) cells, or macrophages. The immune cells express a chimeric antigen receptor (CAR). In some embodiments the immune cells are CAR T-cells, such as a 1^{st} generation CAR T-cell, a 2^{nd} generation CAR T-cell, a 3^{rd} generation CAR T-cell, a 4^{th} generation CAR T-cell, a TRUCK, a smart CAR, or an iCAR.

[0028] In another aspect, the disclosure also provides an antibody-drug conjugate compound as disclosed herein for use in a method of treatment as disclosed herein.

[0029] In another aspect, the disclosure also provides a composition or pharmaceutical composition comprising an antibody-drug conjugate compound as disclosed herein for use in a method of treatment as disclosed herein.

[0030] In another aspect, the disclosure also provides a use of an antibody-drug conjugate compound as disclosed herein in the preparation of a medicament for use in a method of treatments as disclosed herein.

### DETAILED DESCRIPTION

[0031] The present authors have studied the effects of administering the CD25-ADC, ADCx25, in a number of different disease models. Their observations indicated an efficacy of treatment beyond what was expected for a combination of direct target cell killing by the ADC combined with the so-called ‘bystander effect’ indirect cell killing, as described in WO/2016/083468. Building on these observations, the present authors reasoned that increased efficacy of ADCx25 arose from targeted cell-killing of AD25+ve regulatory immune cells, such as Tregs. That is, the present authors have determined that the CD25-ADCs described herein have applications as powerful and specific molecular adjuvants.

[0032] Accordingly, in one aspect the present disclosure provides a method of inducing or enhancing an immune response in a subject, the method comprising the step of administering a CD25-ADC to the subject.

[0033] In another aspect, the present disclosure provides a method of treating or preventing a disorder a subject, wherein the disorder is characterized by a disorder-associated antigen (DAA), the method comprising administering a CD25-ADC to the subject.

[0034] Inducing or Enhancing an Immune Response

[0035] The present disclosure provides method of inducing or enhancing an immune response in a subject.

[0036] Preferably the immune response is a disorder-associated antigen (DAA) specific immune response. That is, the induced or enhanced immune response is elicited by and/or targeted to the DAA.

[0037] For example, in some embodiments the DAA-specific immune response is the activation and/or proliferation of CD8+ve T-cells (commonly referred to as T-Helper cells, or Th cells). DAA-specific Th cells will express a T-cell receptor (TCR) that specifically binds the DAA.

[0038] In some embodiments the DAA-specific immune response is the activation and/or proliferation of CD4+ve T-cells (commonly referred to as cytotoxic T-cells, or T_{c} cells). DAA-specific T_{c} cells will express a T-cell receptor (TCR) that specifically binds the DAA.

[0039] In some embodiments the DAA-specific immune response is the activation and/or proliferation of B-cells. DAA-specific B-cells will express a B-cell receptor (BCR) and/or secrete antibodies that specifically bind the DAA.

[0040] In some embodiments the DAA-specific immune response is the secretion of antibodies that specifically bind the DAA.

[0041] In some embodiments the DAA-specific immune response is the generation of memory cells. The memory cells may be memory T-cells or memory B-cells. The memory T-cells may be memory Tₕ-cells or memory T_{c}-cells. DAA-specific memory cells will express a surface receptor that specifically binds the DAA.

[0042] The term ‘inducing or enhancing an immune response’ as used herein refers to creating, or increasing the level of, the relevant immune response through administration of the CD25-ADC. The enhancement may be relative to, for example, a control subject or population of subjects who have not received the CD25-ADC.

[0043] In some embodiments the existence or level of the immune response may be assessed by measuring the titer of a specific cell or molecule in a sample taken from a subject. For example, the existence or level of a DAA-specific T_{c}-cell response can be assessed by identifying and counting the relevant cells in a sample of peripheral blood taken from a subject.

[0044] In some embodiments, induction of an immune response means that following administration of the CD25-ADC the level of immune response is increased from am undetectable to a detectable level. In some embodiments an immune response is deemed to have ben induced if administration of the CD25-ADC is effective in preventing, ameliorating and/or treating a disorder characterized by a disorder-associated antigen (DAA). Prevention encompasses inhibiting or reducing the spread of the disorder or inhibiting or reducing the onset, development or progression of one or more of the symptoms associated with the disorder. Amelioration as used in herein may refer to the reduction of visible or perceptible disorder symptoms, or any other measurable manifestation of the disorder.

[0045] In some embodiments, enhancement of an immune response means that following administration of the CD25-ADC the level of the immune response is increased by at least 10%, such as by at least 20%, at least 30%, at least 40%, at least 40%, at least 50%, at least 60%, at least 70%, at least 80%, at least 90%, at least 100%, at least 150%, at least 200%, at least 300%, at least 400%, or at least 500%.

[0046] In some embodiments the level of immune response is assessed by determining the number of activated CD4+ve T-cell cells. In some embodiments the level of immune response is assessed by determining the size of certain cell populations, such as NK cells, monocyes, or dendritic cells). In some embodiments the level of immune response is assessed by determining the titre of a specific antibody or antibodies, for example the titre of an antibody or antibodies specific for a DAA.

[0047] In some embodiments the immune response is induced or enhanced by administering the CD25-ADC to the subject in combination with a second immunostimulatory agent. For example, the CD25-ADC may be administered to the subject in combination with a CD3/DAA bispecific T-cell engager (BiTE), an anti-CD47 therapeutic, a PD-1 inhibitor, a PDL-1 inhibitor, a GITR agonist, an OX40 agonist, or a CTLA-1 antagonist, In some embodiments the second immunostimulatory agent used as a monotherapy does not induce a significant immune response in the subject.

[0048] Treating Disorders Characterised by a DAA

[0049] The present disclosure provides a method of treating or preventing a disorder a subject, wherein the disorder is characterized by a disorder-associated antigen (DAA).

[0050] Disorders characterised by a DAA include proliferative diseases such as cancer, wherein neoplastic cells express one or more antigen that is either (i) not expressed on non-neoplastic cells, or more usually (ii) expressed at ha higher level on neoplastic cells than on non-neoplastic cells. Examples of this type of disorder include most prostate cancer s (DAA=PSMA) and some breast cancers (DAA=HER2).

[0051] Disorders characterised by a DAA also include diseases caused by a pathogen, wherein the pathogen is (or expresses) an antigen. Examples of this type of disorder include Human papillomavirus (HPV; DAA(s)=capsid protein(s) and some breast cancers (DAA=HER2).

[0052] A more detailed discussion of disorders characterised by a DAA, along with a selection of example DAAs can be found herein below in the section entitled “Treated disorders”.

[0053] Without wishing to be bound by theory, the efficacy of the treatment methods described herein is believed to arise from the induction and/or enhancement of the subject's immune response against the DAA. This induction and/or enhancement is believed to be due to the administration of the CD25-ADC reducing the immune-suppressive activity of a population of immune regulatory cells (such as CD25+ve T_{reg} cells). The reduction in regulatory-cell immune-suppression allows for the induction and/or enhancement of the immune response against the DAA.

[0054] Treg Cells

[0055] Tregs are identified by surface expression of CD4+ve/CD25^{high}/CD127^{low/-} [33] and form two main subsets: natural Tregs (nTregs),which are thymus-derived, and induced, adaptive or peripheral Tregs (pTregs), which are derived from naive CD4+ T cells under a variety of conditions (Curotto de Lafaille et al., Immunity 30 (2009)626-635-).

[0056] Tregs have immunosuppressive activity, with the more important effector T cells (Teffs) that are suppressed by Tregs being Th1 (control of infections and tumors), Th2 (effectors against extra-cellular parasites, including helminths), Th17 (play an important role in pathogen clearance at mucosal surfaces, are effective against pathogenic fungi and are also involved in different inflammatory process) and CTLs (cytotoxic T cells). Treg-mediated suppression can be accomplished in two ways:by cell-cell contact or by means of soluble mediators and cytokines (paracrine signaling). Several mechanisms have been identified as involved in the immunosuppressive function of Tregs, including:
[0057] (1) inhibition by immunoregulatory cytokines such as TGFβ, IL-10,and IL-35;
[0058] (2) cytolysis of effector cells by producing granzyme and perforin;
[0059] (3) metabolic interruption, including inhibition of proliferative response via the IL-2 receptor, cAMP-mediated metabolic inhibition, tryptophane depletion and immunomodulation mediated by the A2 adenosine receptor or kynurenine; and
[0060] (4) interactions with dendritic cells that modulates their function and maturation (Batista-Duharte et al. 2018, ibid.; Arce-Sillas, et al., J. Immunol. Res. 2016, 1720827).

[0061] Administration of CD25-ADC without DAA

[0062] In some embodiments the DAA is not administered in combination with the DAA. This may be the case in embodiments where, for example, the DAA is already present in the subject when the CD25-ADC is administered. For example, in some embodiments the subject may already have a proliferative disease characterised by a neoplasm whose cells express the DAA. In these cases the subject's immune response against the DAA may be suppressed or attenuated by a population of immune regulatory cells either globally, or in the neoplasm microenvironment.

[0063] For example, as discussed in more detail herein, a number of proliferative disorders have been reported to be associated with an increased number of immune regulatory cells such as T_{reg} cells. Without wishing to be bound by theory, it is believed that reducing the immune-suppressive activity of immune regulatory cells allows for the effective ‘unmasking’ of the DAA-expressing neoplastic cells and their attack by the subject's immune system.

[0064] Accordingly, through stimulation of the subject's immune system the administration of the CD25-ADC allows for the effective treatment of a broad range of disorders.

[0065] Administration of CD25-ADC in Combination with DAA In some embodiments the DAA is administered in combination with a CD25-ADC.

[0066] In embodiments where the DAA is administered to the subject, the term “DAA” encompasses both, (1) the antigen itself in the form it is recognised by the subject immune system, and (2) molecules which stimulate an immune response specific to the DAA. For example, for the HIV core protein p24, the p24 polypeptide itself is a DAA of type (1). An immune response against the p24 protein may also be generated by administering to the subject a suitable vaccine vector containing a nucleotide encoding the p24 protein; accordingly, the nucleotide encoding p24 is a DAA of type (2).

[0067] In some embodiments the DAA is a “self” antigen. For example, many tumour associated antigens (TAAs) are self antigens which are expressed at higher levels on neoplastic cells.

[0068] In some embodiments the DAA is a “non-self” antigen. For example, many antigens expressed by pathogenic microorganisms are non-self antigens.

[0069] Vaccine Compositions

[0070] A DAA may be administered as part of a vaccine composition.

[0071] Preferably the vaccine composition comprises a therapeutically effective amount of the DAA. Therapeutically effective amount refers to an amount of DAA that is effective for preventing, ameliorating and/or treating a disorder characterized by the DAA. Prevention encompasses inhibiting or reducing the spread of the disorder or inhibiting or reducing the onset, development or progression of one or more of the symptoms associated with the disorder. Amelioration as used in herein may refer to the reduction of visible or perceptible disorder symptoms or any other measurable manifestation of the disorder.

[0072] Examples of suitable types of vaccine composition include:
[0073] vectored vaccines, such as viral vectored vaccine, bacterial vectored vaccine, or plasmid DNA;
[0074] non-vectored vaccines, such as those comprising a naked protein DAA.

[0075] The term “vectored vaccines” is well known in the art and includes plasmid DNA, recombinants of poxviruses such as MV A, replicating vaccinia, fowlpox, avipox, also of adenoviruses including nonhuman primate adenoviruses, of alphaviruses, of vesicular stomatitis virus, and bacterial vectors such as Salmonella, Shigella and BCG.

[0076] The vectored vaccine may contain, or contain a nucleic acid encoding, a recombinant protein DAA. The recombinant DAA may be expressed in a viral vector.

[0077] Examples of viral vectors include vaccinia virus vectors such as MVA or NYVAC, avipox vectors such as fowlpox or canarypox (eg. ALVAC), vectors based on herpes virus, and vectors based on Venezuelan equine encephalitis virus (VEE).

[0078] Examples of bacterial vectors include recombinant BCG and recombinant Salmonella and Salmonella transformed with plasmid DNA.

[0079] Examples of non-vectored vaccines include carrier molecules such as lipid-tailed peptides known as lipopeptides, peptides fused to carrier proteins such as KLH either as fusion proteins or by chemical linkage, and antigens modified with a targeting tag, for example C3d or C4b binding protein. Alternatively, naked antigens may be administered.

[0080] In certain embodiments, the vaccine compositions further comprise one or more adjuvants. Adjuvants are known in the art to further increase the immune response to an applied antigenic determinant. The terms “adjuvant” and “immune stimulant” are used interchangeably herein, and are defined as one or more substances that cause stimulation of the immune system. In this context, an adjuvant is used to enhance an immune response to a DAA.

[0081] Examples of suitable adjuvants include aluminium salts such as aluminium hydroxide and/or aluminium phosphate; oil-emulsion compositions (or oil-in-water compositions), including squalene-water emulsions, such as MF59 (see e.g. WO 90/14837); saponin formulations, such as for example QS21 and Immunostimulating Complexes (ISCOMS) (see e.g. U.S. Pat. No. 5,057,540; WO 90/03184, WO 96/11711, WO 2004/004762, WO 2005/002620); bacterial or microbial derivatives, examples of which are monophosphoryl lipid A (MPL), 3-O-deacylated MPL (3dMPL), CpG-motif containing oligonucleotides, ADP-ribosylating bacterial toxins or mutants thereof, such as E. coli heat labile enterotoxin LT, cholera toxin CT, and the like; eukaryotic proteins (e.g. antibodies or fragments thereof (e.g. directed against the antigen itself or CD1a, CD3, CD7, CD80) and ligands to receptors (e.g. CD40L, GMCSF, GCSF, etc), which stimulate immune response upon interaction with recipient cells.

[0082] In certain embodiments the vaccine compositions comprise aluminium as an adjuvant, e.g. in the form of aluminium hydroxide, aluminium phosphate, aluminium potassium phosphate, or combinations thereof, in concentrations of 0.05-5 mg, e.g. from 0.075-1.0 mg, of aluminium content per dose.

[0083] Further examples of adjuvants are discussed in He et al. 2015, Hum. Vac. & Imm. 11:2, pp. 477-488; Garcon et al. 2017, Hum. Vac. & Imm. 13:1, pp. 19-33; Schijns et al. 2011, Exp. Rev. Vac. 10:4, pp. 539-550.

[0084] Administration of the vaccine compositions can be performed using standard routes of administration. Non-limiting embodiments include parenteral administration, such as intradermal, intramuscular, subcutaneous, transcutaneous, or mucosal administration, e.g. intranasal, oral, and the like. In one embodiment a composition is administered by intramuscular injection. The skilled person knows the various possibilities to administer a composition, e.g. a vaccine in order to induce an immune response to the antigen(s) in the vaccine. In certain embodiments, a composition is administered intramuscularly.

[0085] The DAA or vaccine compositions may be administered, either as prime, or as boost, in a homologous or heterologous prime-boost regimen. If a boosting vaccination is performed, typically, such a boosting vaccination will be administered to the same subject at a time between one week and one year, preferably between two weeks and four months, after administering the composition to the subject for the first time (which is in such cases referred to as ‘priming vaccination’). In certain embodiments, the administration comprises a prime and at least one booster administration.

[0086] Sequence of Administration

[0087] The DAA may be administered to the subject before the CD25-ADC, concomitantly with the CD25-ADC, or after the CD25-ADC

[0088] Preferably, the CD25-ADC is administered before the DAA. For example, the CD25-ADC may be administered 1 hour, 2 hours, 6 hours, 12 hours, or 24 hours before the DAA. The CD25-ADC may be administered 1 day, 2 days, 3 days, 4 days, 5 days, 6 days, or 7 days before the DAA. Preferably the CD25-ADC is administered at least 1 day before the DAA, even more preferably at least 2 days before the DAA.

[0089] In some embodiments the immune-suppressive activity of a population of immune regulatory cells is reduced before the DAA is administered to the subject. In some embodiments the reduction in the immune-suppressive activity of the immune regulatory cell population is achieved by killing a proportion of the population. In some embodiments the reduction in the immune-suppressive activity of the immune regulatory cell population is achieved by inhibiting the immune-suppressive activity of a proportion of the regulatory cell population without killing the cells.

[0090] The immune regulatory cells may be myeloid-derived suppressor cells (MDSCs), mesenchymal stromal cells (MSCs), Type II NKT cells, Treg cells, or any other immune regulatory immune cells as defined herein.

[0091] Preferably the immune regulatory cells whose immune-suppressive activity is reduced are Treg cells. The term “Treg” cells as used herein refers to regulatory T-cells. This cell population may be identified by the following pattern of surface-marker expression: CD4+ve, CD25^{high}, CD127^{low/-} (see Yu et al. 2012, Inflammation 35(6), pp. 1773-1780).

[0092] In some embodiments the immune-suppressive activity of a population of immune regulatory cells is reduced by at least 10%, at least 20%, at least 30%, at least 40%, at least 50%, at least 60%, at least 70%, at least 70%, at least 90%, at least 95%, or at least 98% before the DAA is administered to the subject. Preferably, the reduction is measured relative to levels in the same subject prior to the administration of the CD25-ADC.

[0093] In some embodiments the immune-suppressive activity of a population of immune regulatory cells is assessed by measuring the level of inhibitory cytokines such as IL-10, TGFβ, or IL-35 (see Bettini et al., Current opinion in immunology. 2009; 21(6):612-618). In some embodiments the immune-suppressive activity of a population of immune regulatory cells is assessed by measuring the expression of specific genes such as LAYN, MADEH1, or CCR8 (see de Simone et al., Immunity. 2016 Nov. 15; 45(5): 1135-1147).

[0094] In some embodiments the size of a population of immune regulatory cells is reduced by at least 10%, at least 20%, at least 30%, at least 40%, at least 50%, at least 60%, at least 70%, at least 70%, at least 90%, at least 95%, or at least 98% before the DAA is administered to the subject. Preferably, the reduction in population size is measured relative to levels in the same subject prior to the administration of the CD25-ADC.

[0095] In some embodiments the population of immune regulatory cells is measured systemically, for example by using FACS on a representative sample such as whole blood, bone-marrow, lymph-nodes, spleen, peyer-plaques, or tonsils. In some embodiments the population of immune regulatory cells is measured locally, for example in a sample taken from a tumour or the tumour microenvironment. The local population of immune regulatory cells may be measured by, for example, FACS, immunohisochemistry or immunofluorescence of tissue sections. Alternatively, techniques such as RNAscope® may be used on tissue sections to quantify immune regulatory cells in biopsies. Local measurement of cell population is preferred in situations where local measurement is possible (for example, for solid tumours).

[0096] In some embodiments the CD25-ADC is administered concomitantly with the DAA.

[0097] In some embodiments, the dose of CD25-ADC administered is about 20 μg/kg to 80 μg/kg, such as about 20, 25, 30, 35, 40, 45, 50, 55, 60, 65, 70, 75, or 80 μg/kg.

[0098] CD25

[0099] The type I transmembrane protein CD25 is present on activated T- and B-cells, some thymocytes, myeloid precursors, and oligodendrocytes. On activated T-cells, it forms heterodimers with the beta- and gamma subunits (CD122 and CD132), thus comprising the high-affinity receptor for IL-2. This ligand represents a survival factor for activated T-cells, as removal of IL-2 leads to immediate death of these cells.

[0100] In case of B-cells, CD25 is physiologically expressed in early developmental stages of late pro-B and pre-B cells. Malignancies arising from this stage of B-cell differentiation may thus also express CD25. Mast cell lesions are also positive for CD25 which is thus considered as a key diagnostic criterion for determination of systemic mastocytosis. In Hodgkin lymphomas, CD25 is reported to be not expressed in Hodgkin-/Reed-Sternberg cells in nodular lymphocyte predominance Hodgkin lymphoma (NLPHL), whereas the same cell type expresses CD25 at varying levels in classical Hodgkin’ lymphomas of mixed cellularity type. The general expression levels are reported to be lower than in tumor infiltrating lymphocytes (TILs), which may result in problems demonstrating CD25 tumor cells in these cases (Levi et al., Merz et al, 1995).

[0101] Expression of the target antigen has also been reported for several B- and T-cell-derived subtypes of non-Hodgkin-lymphomas, i.e. B-cell chronic lymphatic leukemia, hairy cell leukemia, small cell lymphocytic lymphoma/chronic lymphocytic leukemia as well as adult T-cell leukemia/lymphoma and anaplastic large cell lymphoma.

[0102] CD25 may be localised to the membrane, with some expression observed in the cytoplasm. Soluble CD25 may also be observed outside of cells, such as in serum.

[0103] Antibody Therapy

[0104] Antibody therapy has been established for the targeted treatment of subjects with cancer, immunological and angiogenic disorders (Carter, P. (2006) Nature Reviews Immunology 6:343-357). The use of antibody-drug conjugates (ADC), i.e. immunoconjugates, for the local delivery of cytotoxic or cytostatic agents, i.e. drugs to kill or inhibit tumour cells in the treatment of cancer, targets delivery of the drug moiety to tumours, and intracellular accumulation therein, whereas systemic administration of these unconjugated drug agents may result in unacceptable levels of toxicity to normal cells (Xie et al (2006) Expert. Opin. Biol. Ther. 6(3):281-291; Kovtun et al (2006) Cancer Res. 66(6):3214-3121; Law et al (2006) Cancer Res. 66(4):2328-2337; Wu et al (2005) Nature Biotech. 23(9):1137-1145; Lambert J. (2005) Current Opin. in Pharmacol. 5:543-549; Hamann P. (2005) Expert Opin. Ther. Patents 15(9):1087-1103; Payne, G. (2003) Cancer Cell 3:207-212; Trail et al (2003) Cancer Immunol. Immunother. 52:328-337; Syrigos and Epenetos (1999) Anticancer Research 19:605-614).

[0105] CD25 ADCs

[0106] As used herein, the term “CD25-ADC” refers to an ADC in which the antibody component is an anti-CD25 antibody. In a preferred aspect, the CD25-ADC has the structure defined in the following paragraphs:

[0107] 1. A conjugate of formula L—(D^{L})ₚ, where D^{L} is of formula I or II:

[chemical structure]

[0108] wherein:

[0109] L is an antibody (Ab) which is an antibody that binds to CD25;
[0110] when there is a double bond present between C2′ and C3′, R¹² is selected from the group consisting of:

[0111] (ia) C₅₋₁₀ aryl group, optionally substituted by one or more substituents selected from the group comprising: halo, nitro, cyano, ether, carboxy, ester, C₁₋₇ alkyl, C₃₋₇ heterocyclyl and bis-oxy-C₁₋₃ alkylene;

[0112] (ib) C₁₋₅ saturated aliphatic alkyl;

[0113] (ic) C₃₋₆ saturated cycloalkyl;

[0114] (id)

[chemical structure]

wherein each of R²¹, R²² and R²³ are independently selected from H, C₁₋₃ saturated aikyl, C₂₋₃ alkenyl, C₂₋₃ alkynyl and cyclopropyl, where the total number of carbon atoms in the R¹² group is no more than 5;

[0115] (ie)

[chemical structure]

wherein one of R^{25a} and R^{25b} is H and the other is selected from: phenyl, which phenyl is optionally substituted by a group selected from halo, methyl, methoxy; pyridyl; and thiophenyl; and

[0116] (if)

[chemical structure]

where R²⁴ is selected from: H; C₁₋₃ saturated alkyl; C₂₋₃ alkenyl; C₂₋₃ alkynyl; cyclopropyl; phenyl, which phenyl is optionally substituted by a group selected from halo, methyl, methoxy; pyridyl; and thiophenyl; when there is a single bond present between C2′ and C3′,

[0117] R¹² is

[chemical structure]

where R^{26a} and R^{26b} are independently selected from H, F, C₁₋₄ saturated alkyl, C₂₋₃ alkenyl, which alkyl and alkenyl groups are optionally substituted by a group selected from C₁₋₄ alkyl amido and C₁₋₄ alkyl ester; or, when one of R^{26a} and R^{26b} is H, the other is selected from nitrile and a C₁₋₄ alkyl ester;

[0118] R⁶ and R⁹ are independently selected from H, R, OH, OR, SH, SR, NH₂, NHR, NRR′, nitro, Me₃Sn and halo;

[0119] where R and R′ are independently selected from optionally substituted C₁₋₁₂ alkyl, C₃₋₂₀ heterocyclyl and C-20 aryl groups;

[0120] R⁷ is selected from H, R, OH, OR, SH, SR, NH₂, NHR, NHRR′, nitro, Me₃Sn and halo;

[0121] R″ is a C₃₋₁₂ alkylene group, which chain may be interrupted by one or more heteroatoms, e.g. O, S, NR^{N2} (where R^{N2} is H or C₁₋₄ alkyl), and/or aromatic rings, e.g. benzene or pyridine;

[0122] Y and Y′ are selected from O, S, or NH;

[0123] R^{6′}, R^{7′}, R^{9′} are selected from the same groups as R⁶, R⁷ and R⁹ respectively;

[0124] [Formula I]

[0125] R^{L1′} is a linker for connection to the antibody (Ab);

[0126] R^{11a} is selected from OH, OR^{A}, where R^{A} is C₁₋₄ alkyl, and SO_{z}M, where z is 2 or 3 and M is a monovalent pharmaceutically acceptable cation;

[0127] R²⁰ and R²¹ either together form a double bond between the nitrogen and carbon atoms to which they are bound or;

[0128] R²⁰ is selected from H and R^{C}, where R^{C} is a capping group;

[0129] R²¹ is selected from OH, OR^{A} and SO_{z}M;

[0130] when there is a double bond present between C2 and C3, R² is selected from the group consisting of:

[0131] (ia) C₅₋₁₀ aryl group, optionally substituted by one or more substituents selected from the group comprising: halo, nitro, cyano, ether, carboxy, ester, C₁₋₇ alkyl, C₃₋₇ heterocyclyl and bis-oxy-C₁₋₃ alkylene;

[0132] (ib) C₁₋₅ saturated aliphatic alkyl;

[0133] (ic) C₃₋₆ saturated cycloalkyl;

[0134] (id)

[chemical structure]

wherein each of R¹¹, R¹² and R¹³ are independently selected from H, C₁₋₃ saturated alkyl, C₂₋₃ alkenyl, C₂₋₃ alkynyl and cyclopropyl, where the total number of carbon atoms in the R² group is no more than 5;

[0135] (ie)

[chemical structure]

wherein one of R^{15a} and R^{15b} is H and the other is selected from: phenyl, which phenyl is optionally substituted by a group selected from halo, methyl, methoxy; pyridyl; and thiophenyl; and

[0136] (if)

[chemical structure]

where R¹⁴ is selected from: H; C₁₋₃ saturated alkyl; C₂₋₃ alkenyl; C₂₋₃ alkynyl; cyclopropyl; phenyl, which phenyl is optionally substituted by a group selected from halo, methyl, methoxy; pyridyl; and thiophenyl;

[0137] when there is a single bond present between C2 and C3,

[0138] R² is

[chemical structure]

where R^{16a} and R_{16b} are independently selected from H, F, C₁₋₄ saturated alkyl, C₂₋₃ alkenyl, which alkyl and alkenyl groups are optionally substituted by a group selected from C₁₋₄ alkyl amido and C₁₋₄ alkyl ester; or, when one of R^{16a} and R^{16b} is H, the other is selected from nitrile and a C₁₋₄ alkyl ester;

[0139] [Formula II]

[0140] R²² is of formula IIIa, formula IIIb or formula IIIc:

[0141] (a)

[chemical structure]

[0142] where A is a C₅₋₇ aryl group, and either

[0143] (i) Q¹ is a single bond, and Q² is selected from a single bond and —Z—(CH₂)ₙ—, where Z is selected from a single bond, O, S and NH and n is from 1 to 3; or

[0144] (ii) Q¹ is —CH═CH—, and Q² is a single bond;

[0145] (b)

[chemical structure]

[0146] where;

[0147] R^{C1}, R^{C2} and R^{C3} are independently selected from H and unsubstituted C₁₋₂ alkyl;

[0148] (c)

[chemical structure]

[0149] where Q is selected from O—R^{L2′}, S—R^{L2′} and NR^{N}—R^{L2′} and R_{N} is selected from H, methyl and ethyl

[0150] X is selected from the group comprising: O—R^{L2′}, S—R^{L2′}, CO₂—R^{L2′}, CO—R^{L2′}, NH—C(═O)—R^{L2′} NHNH—R^{L2′}, CONHNH—R^{L2′},

[chemical structure]

NR^{N}R^{L2′}, wherein RN is selected from the group comprising H and C₁₋₄ alkyl;

[0151] R^{L2′} is a linker for connection to the antibody (Ab);

[0152] R¹⁰ and R¹¹ either together form a double bond between the nitrogen and carbon atoms to which they are bound or;

[0153] R¹⁰ is H and R¹¹ is selected from OH, OR^{A} and SO_{z}M;

[0154] R³⁰ and R³¹ either together form a double bond between the nitrogen and carbon atoms to which they are bound or;

[0155] R³⁰ is H and R³¹ is selected from OH, OR^{A} and SO_{z}M.

[0156] 2. The conjugate according to statement 1, wherein the conjugate is not:

[chemical structure]

[chemical structure]

[0157] 3. The conjugate according to either statement 1 or statement 2, wherein R⁷ is selected from H, OH and OR.

[0158] 4. The conjugate according to statement 3, wherein R⁷ is a C₁₋₄ alkyloxy group.

[0159] 5. The conjugate according to any one of statements 1 to 4, wherein Y is O.

[0160] 6. The conjugate according to any one of the preceding statements, wherein R″ is C₃₋₇ alkylene.

[0161] 7. The conjugate according to any one of statements 1 to 6, wherein R⁹ is H.

[0162] 8. The conjugate according to any one of statements 1 to 7, wherein R⁶ is selected from H and halo.

[0163] 9. The conjugate according to any one of statements 1 to 8, wherein there is a double bond between C2′ and C3′, and R¹² is a C₅₋₇ aryl group.

[0164] 10. The conjugate according to statement 9, wherein R¹² is phenyl.

[0165] 11. The conjugate according to any one of statements 1 to 8, wherein there is a double bond between C2′ and C3′, and R¹² is a C₃₋₁₀ aryl group.

[0166] 12. The conjugate according to any one of statements 9 to 11, wherein R¹² bears one to three substituent groups.

[0167] 13. The conjugate according to any one of statements 9 to 12, wherein the substituents are selected from methoxy, ethoxy, fluoro, chloro, cyano, bis-oxy-methylene, methyl-piperazinyl, morpholino and methyl-thiophenyl.

[0168] 14. The conjugate according to any one of statements 1 to 8, wherein there is a double bond between C2′ and C3′, and R¹² is a C₁₋₅ saturated aliphatic alkyl group.

[0169] 15. A compound according to statement 16, wherein R¹² is methyl, ethyl or propyl.

[0170] 16. The conjugate according to any one of statements 1 to 8, wherein there is a double bond between C2′ and C3′, and R¹² is a C₃₋₆ saturated cycloalkyl group.

[0171] 17. The conjugate according to statement 16, wherein R¹² is cyclopropyl.

[0172] 18. The conjugate according to any one of statements 1 to 8, wherein there is a double bond between C2′ and C3′, and R¹² is a group of formula:

[chemical structure]

[0173] 19. The conjugate according to statement 18, wherein the total number of carbon atoms in the R¹² group is no more than 4.

[0174] 20. The conjugate according to statement 19, wherein the total number of carbon atoms in the R¹² group is no more than 3.

[0175] 21. The conjugate according to any one of statements 18 to 20, wherein one of R²¹, R²² and R²³ is H, with the other two groups being selected from H, C₁₋₃ saturated alkyl, C₂₋₃ alkenyl, C₂₋₃ alkynyl and cyclopropyl.

[0176] 22. The conjugate according to any one of statements 18 to 20, wherein two of R²¹, R²² and R²³ are H, with the other group being selected from H, C₁₋₃ saturated alkyl, C₂₋₃ alkenyl, C₂₋₃ alkynyl and cyclopropyl.

[0177] 23. The conjugate according to any one of statements 1 to 8, wherein there is a double bond between C2′ and C3′, and R¹² is a group of formula:

[chemical structure]

[0178] 24. The conjugate according to statement 23, wherein R¹² is the group:

[chemical structure]

[0179] 25. The conjugate according to any one of statements 1 to 8, wherein there is a double bond between C2′ and C3′, and R¹² is a group of formula:

[chemical structure]

[0180] 26. The conjugate according to statement 25, wherein R²⁴ is selected from H, methyl, ethyl, ethenyl and ethynyl.

[0181] 27. The conjugate according to statement 26, wherein R²⁴ is selected from H and methyl.

[0182] 28. The conjugate according to any one of statements 1 to 8, wherein there is a single bond between C2′ and C3′, R¹² is

[chemical structure]

and R^{26a} and R^{26b} are both H.

[0183] 29. The conjugate according to any one of statements 1 to 8, wherein there is a single bond between C2′ and C3′, R¹² is

[chemical structure]

and R^{26a} and R^{26b} are both methyl.

[0184] 30. The conjugate according to any one of statements 1 to 8, wherein there is a single bond between C2′ and C3′, R¹² is

[chemical structure]

one of R^{26a} and R^{26b} is H, and the other is selected from C₁₋₄ saturated alkyl, C₂₋₃ alkenyl, which alkyl and alkenyl groups are optionally substituted.

[0185] [Formula I]

[0186] 31. The conjugate according to any one of statements 1 to 30, wherein there is a double bond between C2 and C3, and R² is a C₅₋₇ aryl group.

[0187] 32. The conjugate according to statement 31, wherein R² is phenyl.

[0188] 33. The conjugate according to any one of statements 1 to 30, wherein there is a double bond between C2 and C3, and R¹ is a C₈₋₁₀ aryl group.

[0189] 34. A compound according to any one of statements 31 to 33, wherein R² bears one to three substituent groups.

[0190] 35. The conjugate according to any one of statements 31 to 34, wherein the substituents are selected from methoxy, ethoxy, fluoro, chloro, cyano, bis-oxy-methylene, methyl-piperazinyl, morpholino and methyl-thiophenyl.

[0191] 36. The conjugate according to any one of statements 1 to 30, wherein there is a double bond between C2 and C3, and R² is a C₁₋₅ saturated aliphatic alkyl group.

[0192] 37. The conjugate according to statement 36, wherein R² is methyl, ethyl or propyl.

[0193] 38. The conjugate according to any one of statements 1 to 30, wherein there is a double bond between C2 and C3, and R² is a C₃₋₆ saturated cycloalkyl group.

[0194] 39. The conjugate according to statement 38, wherein R² is cyclopropyl.

[0195] 40. The conjugate according to any one of statements 1 to 30, wherein there is a double bond between C2 and C3, and R² is a group of formula:

[chemical structure]

[0196] 41. The conjugate according to statement 40, wherein the total number of carbon atoms in the R² group is no more than 4.

[0197] 42. The conjugate according to statement 41, wherein the total number of carbon atoms in the R² group is no more than 3.

[0198] 43. The conjugate according to any one of statements 40 to 42, wherein one of R¹¹, R¹² and R¹³ is H, with the other two groups being selected from H, C₁₋₃ saturated alkyl, C₂₋₃ alkenyl, C₂₋₃ alkynyl and cyclopropyl.

[0199] 44. The conjugate according to any one of statements 40 to 42, wherein two of R¹¹, R¹² and R¹³ are H, with the other group being selected from H, C₁₋₃ saturated alkyl, C₂₋₃ alkenyl, C₂₋₃ alkynyl and cyclopropyl.

[0200] 45. The conjugate according to any one of statements 1 to 30, wherein there is a double bond between C2 and C3, and R² is a group of formula:

[chemical structure]

[0201] 46. The conjugate according to statement 45, wherein R² is the group:

[chemical structure]

[0202] 47. The conjugate according to any one of statements 1 to 30, wherein there is a double bond between C2 and C3, and R² is a group of formula:

[chemical structure]

[0203] 48. The conjugate according to statement 48, wherein R¹⁴ is selected from H, methyl, ethyl, ethenyl and ethynyl.

[0204] 49. The conjugate according to statement 48, wherein R¹⁴ is selected from H and methyl.

[0205] 50. The conjugate according to any one of statements 1 to 30, wherein there is a single bond between C2 and C3, R² is

[chemical structure]

and R^{16a} and R^{16b} are both H.

[0206] 51. The conjugate according to any one of statements 1 to 30, wherein there is a single bond between C2 and C3, R² is

[chemical structure]

and R^{16a} and R^{16b} are both methyl.

[0207] 52. The conjugate according to any one of statements 1 to 30, wherein there is a single bond between C2 and C3, R² is

[chemical structure]

one of R^{16a} and R^{16b} is H, and the other is selected from C₁₋₄ saturated alkyl, C₂₋₃ alkenyl, which alkyl and alkenyl groups are optionally substituted.

[0208] 53. The conjugate according to any one of statements 1 to 52, wherein R^{11a} is OH.

[0209] 54. The conjugate according to any one of statements 1 to 53, wherein R²¹ is OH.

[0210] 55. The conjugate according to any one of statements 1 to 53, wherein R²¹ is OMe.

[0211] 56. The conjugate according to any one of statements 1 to 55, wherein R²⁰ is H.

[0212] 57. The conjugate according to any one of statements 1 to 55, wherein R²⁰ is R^{C}.

[0213] 58. The conjugate according to statement 57, wherein R^{C} is selected from the group consisting of: Alloc, Fmoc, Boc, Troc, Teoc, Psec, Cbz and PNZ.

[0214] 60. The conjugate according to statement 57, wherein R^{C} is a group:

[chemical structure]

[0215] where the asterisk indicates the point of attachment to the N10 position, G² is a terminating group, L³ is a covalent bond or a cleavable linker L¹, L² is a covalent bond or together with OC(=O) forms a self-immolative linker.

[0216] 61. The conjugate according to statement 60, wherein G² is Ac or Moc or is selected from the group consisting of: Alloc, Fmoc, Boc, Troc, Teoc, Psec, Cbz and PNZ.

[0217] 62. The conjugate according to any one of statements 1 to 53, wherein R²⁰ and R²¹ together form a double bond between the nitrogen and carbon atoms to which they are bound.

[0218] [Formula II]

[0219] 63. The conjugate according to any one of statements 1 to 30, wherein R²² is of formula IIIa, and A is phenyl.

[0220] 64. The conjugate according to any one of statements 1 to 30 and statement 63, wherein R²² is of formula IIa, and Q¹ is a single bond.

[0221] 65. The conjugate according to statement 63, wherein Q² is a single bond.

[0222] 66. The conjugate according to statement 63, wherein Q² is —Z—(CH₂)ₙ—, Z is O or S and n is 1 or 2.

[0223] 67. The conjugate according any one of statements 1 to 30 and statement 63, wherein R²² is of formula IIIa, and Q¹ is —CH═CH—.

[0224] 68. The conjugate according to any one of statements 1 to 30, wherein R²² is of formula IIIb,

[0225] and R^{C1}, R^{C2} and R^{C3} are independently selected from H and methyl.

[0226] 69. The conjugate according to statement 68, wherein R^{C1}, R^{C2} and R^{C3} are all H.

[0227] 70. The conjugate according to statement 68, wherein R^{C1}, R^{C2} and R^{C3} are all methyl.

[0228] 71. The conjugate according to any one of statements 1 to 30 and statements 63 to 70, wherein R²² is of formula IIIa or formula IIIb and X is selected from O—R^{L2′}, S—R^{L2′}, CO₂—R^{L2′}, —N—C(═O)—R^{L2′} and NH—R^{L2′}.

[0229] 72. The conjugate according to statement 71, wherein X is NH—R^{L2′}.

[0230] 73. The conjugate according to any one of statements 1 to 30, wherein R²² is of formula IIIc, and Q is NR^{N}—R^{L2′}.

[0231] 74. The conjugate according to statement 73, wherein RN is H or methyl.

[0232] 75. The conjugate according to any one of statements 1 to 30, wherein R²² is of formula IIIc, and Q is O—R^{L2′} or S—R^{L2′}.

[0233] 76. The conjugate according to any one of statements 1 to 30 and statements 63 to 75, wherein R¹¹ is OH.

[0234] 77. The conjugate according to any one of statements 1 to 30 and statements 63 to 75, wherein R¹¹ is OMe.

[0235] 78. The conjugate according to any one of statements 1 to 30 and statements 63 to 77, wherein R¹⁰ is H.

[0236] 79. The conjugate according to any one of statements 1 to 30 and statements 63 to 75, wherein R¹⁰ and R¹¹ together form a double bond between the nitrogen and carbon atoms to which they are bound.

[0237] 80. The conjugate according to any one of statements 1 to 30 and statements 63 to 79, wherein R³¹ is OH.

[0238] 81. The conjugate according to any one of statements 1 to 30 and statements 63 to 79, wherein R³¹ is OMe.

[0239] 82. The conjugate according to any one of statements 1 to 30 and statements 63 to 81, wherein R³⁰ is H.

[0240] 83. The conjugate according to any one of statements 1 to 30 and statements 63 to 79, wherein R³⁰ and R³¹ together form a double bond between the nitrogen and carbon atoms to which they are bound.

[0241] 84. The conjugate according to any one of statements 1 to 83, wherein R^{6′}, R^{7′}, R^{9′}, and Y′ are the same as R⁶, R⁷, R⁹, and Y.

[0242] 85. The conjugate according to any one of statements 1 to 84 wherein, wherein L-R^{L1′} or L-R^{L2′} is a group:

[chemical structure]

[0243] where the asterisk indicates the point of attachment to the PBD, Ab is the antibody, L¹ is a cleavable linker, A is a connecting group connecting L¹ to the antibody, L² is a covalent bond or together with —OC(═O)— forms a self-immolative linker.

[0244] 86. The conjugate of statement 85, wherein L¹ is enzyme cleavable.

[0245] 87. The conjugate of statement 85 or statement 86, wherein L¹ comprises a contiguous sequence of amino acids.

[0246] 88. The conjugate of statement 87, wherein L¹ comprises a dipeptide and the group —X₁—X₂— in dipeptide, —NH—X₁-X₂—CO—, is selected from:
[0247] -Phe-Lys-,
[0248] -Val-Ala-,
[0249] -Val-Lys-,
[0250] -Ala-Lys-,
[0251] -Val-Cit-,
[0252] -Phe-Cit-,
[0253] -Leu-Cit-,
[0254] -Ile-Cit-,
[0255] -Phe-Arg-,
[0256] -Trp-Cit-.

[0257] 89. The conjugate according to statement 88, wherein the group —X₁—X₂— in dipeptide, —NH—X₁-X₂—CO—, is selected from:
[0258] -Phe-Lys-,
[0259] -Val-Ala-,
[0260] -Val-Lys-,
[0261] -Ala-Lys-,
[0262] -Val-Cit-.

[0263] 90. The conjugate according to statement 89, wherein the group —X₁—X₂— in dipeptide, —NH—X₁-X₂—CO—, is -Phe-Lys-, -Val-Ala- or -Val-Cit-.

[0264] 91. The conjugate according to any one of statements 88 to 90, wherein the group X₂—CO— is connected to L².

[0265] 92. The conjugate according to any one of statements 88 to 91, wherein the group NH—X₁— is connected to A.

[0266] 93. The conjugate according to any one of statements 88 to 92, wherein L² together with OC(=O) forms a self-immolative linker.

[0267] 94. The conjugate according to statement 93, wherein C(═O)O and L² together form the group:

[chemical structure]

[0268] where the asterisk indicates the point of attachment to the PBD, the wavy line indicates the point of attachment to the linker L¹, Y is NH, O, C(═O)NH or C(═O)O, and n is 0 to 3.

[0269] 95. The conjugate according to statement 94, wherein Y is NH.

[0270] 96. The conjugate according to statement 94 or statement 95, wherein n is 0.

[0271] 97. The conjugate according to statement 95, wherein L¹ and L² together with —OC(═O)-comprise a group selected from:

[chemical structure]

[0272] where the asterisk indicates the point of attachment to the PBD, and the wavy line indicates the point of attachment to the remaining portion of the linker L¹ or the point of attachment to A.

[0273] 98. The conjugate according to statement 97, wherein the wavy line indicates the point of attachment to A.

[0274] 99. The conjugate according to any one of statements 85 to 98, wherein A is:

[chemical structure]

[0275] where the asterisk indicates the point of attachment to L¹, the wavy line indicates the point of attachment to the antibody, and n is 0 to 6; or

[chemical structure]

[0276] where the asterisk indicates the point of attachment to L¹, the wavy line indicates the point of attachment to the antibody, n is 0 or 1, and m is 0 to 30.

[0277] 100. A conjugate according to statement 1 of formula ConjA:

[chemical structure]

[chemical structure]

[0278] 101. The conjugate according to any one of statements 1 to 100 wherein the antibody comprises:
[0279] a VH domain having a VH CDR1 with the amino acid sequence of SEQ ID NO.3, a VH CDR2 with the amino acid sequence of SEQ ID NO.4, and a VH CDR3 with the amino acid sequence of SEQ ID NO.5.

[0280] 102. The conjugate according to any one of statements 1 to 101 wherein the antibody comprises a VH domain having the sequence according to SEQ ID NO. 1.

[0281] 103. The conjugate according to any one of statements 1 to 102 wherein the antibody comprises:
[0282] a VL domain comprising a VL CDR1 with the amino acid sequence of SEQ ID NO.6, a VL CDR2 with the amino acid sequence of SEQ ID NO.7, and a VL CDR3 with the amino acid sequence of SEQ ID NO.8.

[0283] 104. The conjugate according to any one of statements 1 to 103 wherein the antibody comprises a VL domain having the sequence according to SEQ ID NO. 2.

[0284] 105. The conjugate according to any one of statements 1 to 103 wherein the antibody in an intact antibody.

[0285] 106. The conjugate according to any one of statements 1 to 105 wherein the antibody is humanised, deimmunised or resurfaced.

[0286] 107. The conjugate according to any one of statements 1 to 104 wherein the antibody is a fully human monoclonal IgG1 antibody, preferably IgG1,K.

[0287] 108. The conjugate according to any one of statements 1 to 107 wherein the drug loading (p) of drugs (D) to antibody (Ab) is an integer from 1 to about 8.

[0288] 109. The conjugate according to statement 108, wherein p is 1, 2, 3, or 4.

[0289] 110. The conjugate according to statement 108 comprising a mixture of the antibody-drug conjugate compounds, wherein the average drug loading per antibody in the mixture of antibody-drug conjugate compounds is about 2 to about 5.

[0290] The definition of the terms used in the above statement are as defined in WO2014/057119.

[0291] Preferred CD25-ADC Embodiments

[0292] The term anti-CD25-ADC may include any embodiment described in WO 2014/057119. In particular, in preferred embodiments the ADC has the chemical structure:

[chemical structure]

where the Ab is a CD25 antibody, and the DAR is between 1 and 8.

[0293] The antibody may comprise a VH domain comprising a VH CDR1 with the amino acid sequence of SEQ ID NO.3, a VH CDR2 with the amino acid sequence of SEQ ID NO.4, and a VH CDR3 with the amino acid sequence of SEQ ID NO.5.

[0294] In some aspects the antibody component of the anti-CD25-ADC is an antibody comprising: a VH domain comprising a VH CDR1 with the amino acid sequence of SEQ ID NO.3, a VH CDR2 with the amino acid sequence of SEQ ID NO.4, and a VH CDR3 with the amino acid sequence of SEQ ID NO.5. In some embodiments the antibody comprises a VH domain having the sequence according to SEQ ID NO. 1.

[0295] The antibody may further comprise: a VL domain comprising a VL CDR1 with the amino acid sequence of SEQ ID NO.6, a VL CDR2 with the amino acid sequence of SEQ ID NO.7, and a VL CDR3 with the amino acid sequence of SEQ ID NO.8. In some embodiments the antibody further comprises a VL domain having the sequence according to SEQ ID NO. 2.

[0296] In some embodiments the antibody comprises a VH domain and a VL domain, the VH and VL domains having the sequences of SEQ ID NO. 1 paired with SEQ ID NO. 2.

[0297] The VH and VL domain(s) may pair so as to form an antibody antigen binding site that binds CD25.

[0298] In preferred embodiments the antibody is an intact antibody comprising a VH domain and a VL domain, the VH and VL domains having sequences of SEQ ID NO. 1 and SEQ ID NO. 2.

[0299] In some embodiments the antibody is a fully human monoclonal IgG1 antibody, preferably IgG1,κ.

[0300] In some embodiments the antibody is the AB12 antibody described in WO 2004/045512 (Genmab A/S).

[0301] In an aspect the antibody is an antibody as described herein which has been modified (or further modified) as described below. In some embodiments the antibody is a humanised, deimmunised or resurfaced version of an antibody disclosed herein.

[0302] The most preferred anti-CD25-ADCs for use with the aspects of the present disclosure is ADCX25/ADCT-301/Camidanlumab Tesirine; the structure of ADCx25 is described herein below.

[0303] ADCx25

[0304] ADCx25 is an antibody drug conjugate composed of a human antibody against human CD25 attached to a pyrrolobenzodiazepine (PBD) warhead via a cleavable linker. The mechanism of action of ADCX25 depends on CD25 binding. The CD25 specific antibody targets the antibody drug conjugate (ADC) to cells expressing CD25. Upon binding, the ADC internalizes and is transported to the lysosome, where the protease sensitive linker is cleaved and free PBD dimer is released inside the target cell. The released PBD dimer inhibits transcription in a sequence-selective manner, due either to direct inhibition of RNA polymerase or inhibition of the interaction of associated transcription factors. The PBD dimer produces covalent crosslinks that do not distort the DNA double helix and which are not recognized by nucleotide excision repair factors, allowing for a longer effective period (Hartley 2011).

[0305] It has the chemical structure:

[chemical structure]

[0306] Ab represents Antibody AB12 (fully human monoclonal IgG1, K antibody with the VH and VL sequences SEQ ID NO. 1 and SEQ ID NO. 2, respectively, also known as HuMax-TAC). It is synthesised as described in WO 2014/057119 (Conj AB12-E) and typically has a DAR (Drug to Antibody Ratio) of 2.0+/−0.3.

[0307] CD25 Binding

[0308] The “first target protein” (FTP) as used herein is preferably CD25.

[0309] As used herein, “binds CD25” is used to mean the antibody binds CD25 with a higher affinity than a non-specific partner such as Bovine Serum Albumin (BSA, Genbank accession no. CAA76847, version no. CAA76847.1 GI:3336842, record update date: Jan. 7, 2011 02:30 PM). In some embodiments the antibody binds CD25 with an association constant (Kₐ) at least 2, 3, 4, 5, 10, 20, 50, 100, 200, 500, 1000, 2000, 5000, 104, 10⁵ or 10⁶-fold higher than the antibody's association constant for BSA, when measured at physiological conditions. The antibodies of the disclosure can bind CD25 with a high affinity. For example, in some embodiments the antibody can bind CD25 with a K_{D} equal to or less than about 10⁻⁶ M, such as equal to or less than one of 1×10⁻⁶, 10⁻⁷, 10⁻⁸, 10⁻⁹, 10⁻¹⁰, 10⁻¹¹, 10⁻¹², 10⁻¹³ or 10⁻¹⁴.

[0310] In some embodiments, CD25 polypeptide corresponds to Genbank accession no. NP_000408, version no. NP_000408.1 GI:4557667, record update date: Sep. 9, 2012 04:59 PM. In one embodiment, the nucleic acid encoding CD25 polypeptide corresponds to Genbank accession no. NM_000417, version no. NM_000417.2 GI:269973860, record update date: Sep. 9, 2012 04:59 PM. In some embodiments, CD25 polypeptide corresponds to Uniprot/Swiss-Prot accession No. P01589.

[0311] Therapeutic Uses of CD25 ADCs

[0312] The efficacy of an Antibody Drug Conjugate comprising an anti-CD25 antibody (herein termed a CD25-ADC) in the treatment of, for example, cancer is known—see, for example, WO2014/057119, WO2016/083468, and WO2016/166341.

[0313] Combination with Cell Therapy

[0314] In an aspect, the therapies described herein are combined with cell therapy, such as CAR T-cell therapy. Without wishing to be bound by theory, in this aspect the administration of a CD25-ADC is used to reduce the immune-suppressive activity of a population of immune regulatory cells, to allow for greater efficacy of a cell therapy administered in combination with the CD25-ADC.

[0315] Preferably, the CD25-ADC is administered before the cell therapy. For example, the CD25-ADC may be administered 1 hour, 2 hours, 6 hours, 12 hours, or 24 hours before the cell therapy. The CD25-ADC may be administered 1 day, 2 days, 3 days, 4 days, 5 days, 6 days, 7 days, 8 days, 9 days, 10 days, 11 days, 12 days, 13 days, or 14 days before the cell therapy.

[0316] Preferably the gap between CD25-ADC and cell therapy administrations is sufficient for the systemic level of CD25-ADC to drop to 25% or less of the administered dose (i.e. 2 half-lives of the CD25-ADC) before the cell therapy is administered. This is so the cells administered during the cell therapy are not exposed to high levels of the CD25-ADC. Typically, the CD25-ADC is administered at least 7 days before the cell therapy.

[0317] In some embodiments the immune-suppressive activity of a population of immune regulatory cells is reduced before the cell therapy is administered to the subject. In some embodiments the reduction in the immune-suppressive activity of the immune regulatory cell population is achieved by killing a proportion of the population. In some embodiments the reduction in the immune-suppressive activity of the immune regulatory cell population is achieved by inhibiting the immune-suppressive activity of a proportion of the regulatory cell population without filling the cells.

[0318] The immune regulatory cells may be myeloid-derived suppressor cells (MDSCs), mesenchymal stromal cells (MSCs), Type II NKT cells, Treg cells, or any other immune regulatory immune cells as defined herein.

[0319] Preferably the immune regulatory cells whose immune-suppressive activity is reduced are Treg cells. The term “Treg” cells as used herein refers to regulatory T-cells. This cell population may be identified by the following pattern of surface-marker expression: CD4+ve, CD25^{high} CD127^{llow/-} (see Yu et al. 2012, Inflammation 35(6), pp. 1773-1780.

[0320] In some embodiments the immune-suppressive activity of a population of immune regulatory cells is reduced by at least 10%, at least 20%, at least 30%, at least 40%, at least 50%, at least 60%, at least 70%, at least 70%, at least 90%, at least 95%, or at least 98% before the cell therapy is administered to the subject. Preferably, the reduction is measured relative to levels in the same subject prior to the administration of the CD25-ADC.

[0321] In some embodiments the immune-suppressive activity of a population of immune regulatory cells is assessed by measuring the level of inhibitory cytokines such as IL-10, TGFβ, or IL-35 (see Bettini et al., Current opinion in immunology. 2009; 21(6):612-618). In some embodiments the immune-suppressive activity of a population of immune regulatory cells is assessed by measuring the expression of specific genes such as LAYN, MADEH1, or CCR8 (see de Simone et al., Immunity. 2016 Nov. 15; 45(5): 1135-1147).

[0322] In some embodiments the size of a population of immune regulatory cells is reduced by at least 10%, at least 20%, at least 30%, at least 40%, at least 50%, at least 60%, at least 70%, at least 70%, at least 90%, at least 95%, or at least 98% before the cell therapy is administered to the subject. Preferably, the reduction in population size is measured relative to levels in the same subject prior to the administration of the CD25-ADC.

[0323] In some embodiments the population of immune regulatory cells is measured systemically, for example by using FACS on a representative sample such as whole blood. In some embodiments the population of immune regulatory cells is measured locally, for example in a sample taken from a tumour or the tumour microenvironment. The local population of immune regulatory cells may be measured by, for example, immunofluorescence of tissue sections.

[0324] In some embodiments the CD25-ADC is administered concomitantly with the cell therapy.

[0325] In some embodiments the cell therapy comprises the administration of autologous cells. In some embodiments the cell therapy comprises the administration of allogenic cells.

[0326] In some embodiments the cell therapy comprises the administration of stem cells.

[0327] In some embodiments the cell therapy comprises the administration of immune cells. The immune cells may be cytotoxic effector cells. The immune cells may be T-cells, Natural Killer (NK) cells, Natural Killer T-cell (NKT), Lymphokine-activated Killer (LAK) cells, or macrophages.

[0328] In preferred embodiments, the immune cells are ‘CAR immune cells’, as defined herein below.

[0329] CAR Immune Cells

[0330] Conventional immune cells may be genetically modified such that they express a CAR as described and referenced herein below. An immune cells so modified is described herein as “CAR immune cell” and is suitable for use in the cell therapies as described herein.

[0331] CARs may be expressed in a number of different immune cells. Suitable immune cells for expressing a CAR include T-cells—such as cytotoxic T-cells and helper T-cells—as well as Natural Killer (NK) cells.

[0332] In preferred cases, the CAR immune cell is a T-cell. In these cases, the CAR expressing T-cell is termed here in as a “CAR T-cell”.

[0333] CARs

[0334] As used herein, the term Chimeric antigen receptors (CARs) has its normal meaning in the art, including The current state of the art with respect to CARs is reviewed in for example: Hartmann, J., et al., EMBO Mol. Med., 2017, Vol. 9, Issue 9, pp. 1183-1197//Brudno, JN. & Kochendorfer, J N., 2016, Blood, vol. 127, no. 26, pp. 3321-3330//Zhang and Xu, J. Hematology & Oncology, 2017, 10:1, DOI 10.1186/s13045-016-0379-6//references cited therein.

[0335] Briefly, all CARs are composed of an extracellular binding domain, a hinge region, a transmembrane domain, and one or more intracellular signaling domains. Single-chain variable fragments (scFvs) derived from tumor antigen-reactive antibodies are typically used as extracellular binding domains. All CARs harbor the CD3epsilon chain domain as the intracellular signaling domain.

[0336] Like antibodies, the extracellular binding domain of a CAR is capable of recognizing and binding to a specific antigen. (Janeway, C., Travers, P., Walport, M., Shlomchik (2001) Immuno Biology, 5th Ed., Garland Publishing, New York). A target antigen generally has numerous binding sites, also called epitopes, recognized by Complementarity Determining Regions (CDRs) on multiple CARs. Each CAR that specifically binds to a different epitope has a different structure. Thus, one antigen may have more than one corresponding CAR. A CAR may comprise a full-length immunoglobulin molecule or an immunologically active portion of a full-length immunoglobulin molecule, i.e., a molecule that contains an antigen binding site that immunospecifically binds an antigen of a target of interest or part thereof (eg. An scFv), such targets including but not limited to, cancer cells.

[0337] In addition to the CD3 epsilon chain, second- and third-generation CARs also contain one or more co-stimulatory domains, like CD28 and/or 4-1 BB. These co-stimulatory domains improve proliferation, cytokine secretion, resistance to apoptosis, and in vivo persistence of cells expressing the CARs. Third-generation CARs exhibit improved effector functions and in vivo persistence as compared to second-generation CARs.

[0338] Fourth-generation CARs, so-called TRUCKs or armored CARs, combine the expression of a second-generation CAR with factors that enhance anti-tumoral activity, such as cytokines, costimulatory ligands, or enzymes that degrade the extracellular matrix of solid tumors (Chmielewski & Abken, 2015, Expert Opin Biol Ther 15, pp. 1145-1154).

[0339] Further varieties of CARs exist with enhanced safety features. These include so-called smart T cells which are either equipped with a suicide gene or include synthetic control devices are under non-clinical and clinical investigation (Zhang & Xu, ibid.).

[0340] Combination with Checkpoint Inhibitors

[0341] In an aspect, the CD25-ADCs described herein are administered in combination with a checkpoint inhibitor.

[0342] The CD25-ADC may be administered before the checkpoint inhibitor, simultaneous with the checkpoint inhibitor, or after the checkpoint inhibitor.

[0343] The checkpoint inhibitor may be, for example, a PD1 antagonist, a PD-L1 antagonist, a GITR agonist, an OX40 agonist, or a CTLA-4 antagonist

[0344] PD1 Antagonists

[0345] Programmed death receptor I (PD1) is an immune-inhibitory receptor that is primarily expressed on activated T and B cells. Interaction with its ligands has been shown to attenuate T-cell responses both in vitro and in vivo. Blockade of the interaction between PD1 and one of its ligands, PD-L1, has been shown to enhance tumor-specific CD8+ T-cell immunity and may therefore be helpful in clearance of tumor cells by the immune system.

[0346] PD1 (encoded by the gene Pdcdl) is an Immunoglobulin superfamily member related to CD28, and CTLA-4. PD1 has been shown to negatively regulate antigen receptor signalling upon engagement of its ligands (PD-L1 and/or PD-L2). The structure of murine PD1 has been solved as well as the co-crystal structure of mouse PD1 with human PD-L1 (Zhang, X., et al., (2004) Immunity 20: 337-347; Lin, et al., (2008) Proc. Natl. Acad. Sci. USA 105: 30I I-6). PD1 and like family members are type I transmembrane glycoproteins containing an Ig Variable-type (V-type) domain responsible for ligand binding and a cytoplasmic tail that is responsible for the binding of signaling molecules. The cytoplasmic tail of PD1 contains two tyrosine-based signaling motifs, an ITIM (immunoreceptor tyrosine-based inhibition motif) and an ITSM (immunoreceptor tyrosine-based switch motif).

[0347] In humans, expression of PD1 (on tumor infiltrating lymphocytes) and/or PD-L1 (on tumor cells) has been found in a number of primary tumor biopsies assessed by immunohistochemistry. Such tissues include cancers of the lung, liver, ovary, cervix, skin, colon, glioma, bladder, breast, kidney, esophagus, stomach, oral squamous cell, urothelial cell, and pancreas as well as tumors of the head and neck (Brown, J. A., et al., (2003) J Immunol. I 70: I257-I266; Dong H., et al., (2002) Nat. Med. 8: 793-800; Wintterle, et al., (2003) Cancer Res. 63: 7462-7467; Strome, S. E., et al., (2003) Cancer Res. 63: 650I-6505; Thompson, R. H., et al., (2006) Cancer Res. 66: 3381-5; Thompson, et al., (2007) Clin. Cancer Res. 13: I 757-6I; Nomi, T., et al., (2007) Clin. Cancer Res. 13: 2I5I-7). More strikingly, PD-ligand expression on tumor cells has been correlated to poor prognosis of cancer patients across multiple tumor types (reviewed in Okazaki and Honjo, (2007) Int. Immunol. 19: 813-824).

[0348] To date, numerous studies have shown that interaction of PD1 with its ligands (PD-L1 and PD-L2) leads to the inhibition of lymphocyte proliferation in vitro and in vivo. Blockade of the PD1/PD-L1 interaction could lead to enhanced tumor-specific T-cell immunity and therefore be helpful in clearance of tumor cells by the immune system. To address this issue, a number of studies were performed. In a murine model of aggressive pancreatic cancer (Nomi, T., et al. (2007) Clin. Cancer Res. 13: 2151-2157), the therapeutic efficacy of PD1/PD-L1 blockade was demonstrated. Administration of either PD1 or PD-L1 directed antibody significantly inhibited tumor growth. Antibody blockade effectively promoted tumor reactive CD8+ T cell infiltration into the tumor resulting in the up-regulation of anti-tumor effectors including IFN gamma, granzyme Band perforin. Additionally, the authors showed that PD1 blockade can be effectively combined with chemotherapy to yield a synergistic effect. In another study, using a model of squamous cell carcinoma in mice, antibody blockade of PD1 or PD-L1 significantly inhibited tumor growth (Tsushima, F., et al., (2006) Oral Oneal. 42: 268-274).

[0349] “PD1 antagonist” means any chemical compound or biological molecule that stimulates an immune reaction through inhibition of PD1 signalling.

[0350] To examine the extent of enhancement of, e.g., PD1 activity, samples or assays comprising a given, e.g., protein, gene, cell, or organism, are treated with a potential activating or inhibiting agent and are compared to control samples treated with an inactive control molecule. Control samples are assigned a relative activity value of 100%. Inhibition is achieved when the activity value relative to the control is about 90% or less, typically 85% or less, more typically 80% or less, most typically 75% or less, generally 70% or less, more generally 65% or less, most generally 60% or less, typically 55% or less, usually 50% or less, more usually 45% or less, most usually 40% or less, preferably 35% or less, more preferably 30% or less, still more preferably 25% or less, and most preferably less than 20%. Activation is achieved when the activity value relative to the control is about 110%, generally at least 120%, more generally at least 140%, more generally at least 160%, often at least 180%, more often at least 2-fold, most often at least 2.5-fold, usually at least 5-fold, more usually at least 10-fold, preferably at least 20-fold, more preferably at least 40-fold, and most preferably over 40-fold higher.

[0351] Combining an ADC, which targets a first target protein (FTP) with PD1 inhibitors is advantageous, because on the one hand, the ADC will directly kill the FTP positive tumor cells, while on the other hand the PD1 inhibitor will engage the patient's own immune system to eliminate the cancer cells. Next to FTP(+) tumor cells, FTP negative tumor cells in close proximity to FTP(+) tumor cells will potentially be killed by the bystander mechanism of the PBD-dimer released after cell kill of CD25(+) cells. Hence, the ADC will directly kill the tumor cells.

[0352] The resulting release of tumor associated antigens from cells that are killed with the PBD dimer will trigger the immune system, which will be further enhanced by the use of programmed cell death protein 1 (PD1) inhibitors, expressed on a large proportion of tumour infiltrating lymphocytes (TILs) from many different tumour types. Blockade of the PD1 pathway may enhance antitumour immune responses against the antigens released from the tumors killed by the ADC by diminishing the number and/or suppressive activity of intratumoral TReg cells.

[0353] The major function of PD1 is to limit the activity of T-cells at the time of an anti-inflammatory response to infection and to limit autoimmunity. PD1 expression is induced when T-cells become activated, and binding of one of its own ligands inhibits kinases involved in T-cell activation. Hence, in the tumor environment this may translate into a major immune resistance, because many tumours are highly infiltrated with TReg cells that probably further suppress effector immune responses. This resistance mechanism is alleviated by the use of PD1 inhibitors in combination with the ADC.

[0354] PD1 antagonists suitable for use as secondary agents in the present disclosure include:
[0355] a) a PD1 antagonist which inhibits the binding of PD1 to its ligand binding partners.
[0356] b) a PD1 antagonist which inhibits the binding of PD1 to PD-L1.
[0357] c) a PD1 antagonist which inhibits the binding of PD-1 to PDL2.
[0358] d) a PD1 antagonist which inhibits the binding of PD-1 to both PDLI and PDL2.
[0359] e) a PD1 antagonist of parts (a) to (d) which is an antibody.

[0360] Specific PD1 antagonists suitable for use as secondary agents in the present disclosure include:
[0361] a) pembrolizumab (brand name Keytruda)
   [0362] i. CAS Number→1374853-91-4
      [0363] (see http://www.cas.org/content/chemical-substances/faqs)
   [0364] ii. NCBI Pubchem reference→254741536
      [0365] (see https://pubchem.ncbi.nlm.nih.gov/)
   [0366] iii. DrugBank reference→DB09037
      [0367] (see https://www.drugbank.ca/)
   [0368] iv. Unique Ingredient Identifier (UNII)→DPT003T46P
   [0369] (see http://www.fda.gov/Forlndustry/DataStandards/SubstanceRegistration System-UniqueIngredientIdentifierUNII/default.htm)
[0370] b) nivolumab (brand name Opdivo)
   [0371] i. CAS Number→946414-94-4
      [0372] (see http://www.cas.org/content/chemical-substances/faqs)
   [0373] ii. DrugBank reference→DB09035
      [0374] (see https://www.drugbank.ca/)
[0375] c) MED10680 (formerly AMP-514)
   [0376] As described in WO2014/055648, WO2015/042246, WO2016/127052, WO2017/004016, WO2012/145493, U.S. Pat. No. 8,609,089, WO2016/007235, WO2016/011160; Int. J. Mol. Sci. 2016 July; 17(7): 1151, doi: 10.3390/ijms17071151; and Drug Discov Today, 2015 September; 20(9):1127-34. doi: 10.1016/j.drudis.2015.07.003.
   [0377] See also clinical trials NCT02271945 and NCT02013804 at https://clinicaltrials.gov/ct2/home
[0378] d) PDR001 (spartalizumab)
   [0379] i. CAS Number→1935694-88-4
      [0380] (see http://www.cas.org/content/chemical-substances/faqs)
   [0381] ii. Unique Ingredient Identifier (UNII)→QOG25L6Z8Z
      [0382] (see http://www.fda.gov/Forlndustry/DataStandards/SubstanceRegistration System-UniquelngredientldentifierUNll/default.htm)
      [0383] As described in WO2016/007235 and WO2016/011160
      [0384] NCI thesaurus code→C121625
      [0385] (see https://ncit.nci.nih.gov/ncitbrowser/)
[0386] e) Camrelizumab [INCSHR-1210] (Incyte)
   [0387] i. CAS Number→1798286-48-2
      [0388] (see http://www.cas.org/content/chemical-substances/faqs)
   [0389] ii. Unique Ingredient Identifier (UNII)→73096E137E
      [0390] (see

[chemical structure]

[0391] http://www.fda.gov/Forlndustry/DataStandards/SubstanceRegistration System-UniquelngredientldentifierUNll/default.htm)
[0392] f) AUNP12 (peptide) (Aurigene/PierreFabre)
   [0393] i. Disclosed in WO2011/161699 as SEQ ID NO:49 a.k.a. “compound 8”, see Example 2 on page 77 of the A2 publication of WO2011/161699.
   [0394] ii. CAS Number→1353563-85-5 (see http://www.cas.org/content/chemical-substances/faqs)
[0395] g) Pidilizumab (CT-01 1)
   [0396] i. CAS Number→1036730-42-3
      [0397] (see http://www.cas.org/content/chemical-substances/faqs)
   [0398] ii. Unique Ingredient Identifier (UNII)→B932PAQ1BQ
      [0399] (see http://www.fda.gov/Forlndustry/DataStandards/SubstanceRegistration System-UniquelngredientldentifierUNll/default.htm)
[0400] h) Cemiplimab (formerly REGN-2810, SAR-439684)
   [0401] i. CAS Number→1801342-60-8
      [0402] (see http://www.cas.org/content/chemical-substances/faqs)
   [0403] ii. Unique Ingredient Identifier (UNII)→6QVL057INT
      [0404] (see http://www.fda.gov/Forlndustry/DataStandards/SubstanceRegistration System-UniqueIngredientIdentifierUNII/default.htm)
      [0405] As described in WO2016/007235
      [0406] NCI thesaurus code→C121540
      [0407] (see https://ncit.nci.nih.gov/ncitbrowser/)
[0408] i) BGB-A317 (Tislelizumab)
   [0409] i. As described in U.S. Pat. No. 9,834,606 B2
   [0410] ii. See clinical trial NCT03209973 (https://clinicaltrials.gov/)
   [0411] iii. NCI thesaurus code C121775
      [0412] (see https://ncit.nci.nih.gov/ncitbrowser/)
[0413] j) BGB-108
   [0414] See WO2016/000619 and U.S. Pat. No. 8,735,553
[0415] k) AMP-224
   [0416] see clinical trial NCT02298946, https://clinicaltrials.gov/ct2/home

[0417] In some embodiments, PD1 polypeptide corresponds to Genbank accession no. AAC51773, version no. AAC51773.1, record update date: Jun. 23, 2010 09:24 AM. In one embodiment, the nucleic acid encoding PD1 polypeptide corresponds to Genbank accession no. U64863, version no. U64863.1, record update date: Jun. 23, 2010 09:24 AM. In some embodiments, PD1 polypeptide corresponds to Uniprot/Swiss-Prot accession No. Q15116.

[0418] PD-L1 Antagonists

[0419] “PD-L1 antagonist” means any chemical compound or biological molecule that stimulates an immune reaction through inhibition of PD-L1 signalling.

[0420] To examine the extent of enhancement of, e.g., PD-L1 activity, samples or assays comprising a given, e.g., protein, gene, cell, or organism, are treated with a potential activating or inhibiting agent and are compared to control samples treated with an inactive control molecule. Control samples are assigned a relative activity value of 100%. Inhibition is achieved when the activity value relative to the control is about 90% or less, typically 85% or less, more typically 80% or less, most typically 75% or less, generally 70% or less, more generally 65% or less, most generally 60% or less, typically 55% or less, usually 50% or less, more usually 45% or less, most usually 40% or less, preferably 35% or less, more preferably 30% or less, still more preferably 25% or less, and most preferably less than 20%. Activation is achieved when the activity value relative to the control is about 110%, generally at least 120%, more generally at least 140%, more generally at least 160%, often at least 180%, more often at least 2-fold, most often at least 2.5-fold, usually at least 5-fold, more usually at least 10-fold, preferably at least 20-fold, more preferably at least 40-fold, and most preferably over 40-fold higher.

[0421] Combining an ADC, which targets a first target protein (FTP) positive lymphomas and leukemias with PD-L1 inhibitors is advantageous because, on the one hand, the ADC will directly kill the FTP positive tumor cells while, on the other hand, the PD-L1 inhibitor will engage the patient's own immune system to eliminate the cancer cells.

[0422] Next to FTP(+) tumor cells, target negative tumor cells in close proximity to FTP(+) tumor cells will potentially be killed by the bystander mechanism of the PBD-dimer released after cell kill of FTP(+) cells. Hence, the ADC will directly kill the tumor cells. The resulting release of tumor associated antigens from cells that are killed with the PBD dimer will trigger the immune system, which will be further enhanced by the use of programmed cell death protein 1 ligand inhibitors (PD-L1, aka B7-H1 or CD274).

[0423] PD-L1 is commonly upregulated on the tumour cell surface from many different human tumours. Interfering with the PD1 ligand expressed on the tumor will avoid the immune inhibition in the tumor microenvironment and therefore blockade of the PD1 pathway using PDL1 inhibitors may enhance antitumour immune responses against the antigens released from the tumors killed by the ADC.

[0424] Combining an ADC, which targets a first target protein (FTP) with PD1 inhibitors is advantageous, because on the one hand, the ADC will directly kill the FTP positive tumor cells, while on the other hand the PD1 inhibitor will engage the patient's own immune system to eliminate the cancer cells. Next to FTP(+) tumor cells, FTP negative tumor cells in close proximity to FTP(+) tumor cells will potentially be killed by the bystander mechanism of the PBD-dimer released after cell kill of CD19(+) or CD22 (+) cells. Hence, the ADC will directly kill the tumor cells.

[0425] PD-L1 antagonists suitable for use as secondary agents in the present disclosure include PD-L1 antagonists that:
[0426] (a) are PD-L1 binding antagonists;
[0427] (b) inhibit the binding of PD-L1 to PD1;
[0428] (c) inhibit the binding of PD-L1 to B7-1;
[0429] (d) inhibit the binding of PD-L1 to both PD1 and B7-1;
[0430] (e) are anti-PD-L1 antibodies.

[0431] Specific PD-L1 antagonists suitable for use as secondary agents in the present disclosure include:
[0432] a) atezolizumab (MPDL3280A, brand name Tecentriq)
   [0433] i. CAS Number→1380723-44-3
      [0434] (see http://www.cas.org/content/chemical-substances/faqs)
   [0435] ii. DrugBank reference→DB11595
      [0436] (see https://www.drugbank.ca/)
   [0437] iii. Unique Ingredient Identifier (UNII)→52CM10WC3Y
      [0438] (see http://www.fda.gov/Forlndustry/DataStandards/SubstanceRegistration System-UniqueIngredientIdentifierUNII/default.htm)
[0439] b) BMS-936559/MDX-1105
   [0440] I. CAS Number→1422185-22-5
      [0441] (see http://www.cas.org/content/chemical-substances/fags)
   [0442] II. see clinical trial NCT02028403, https://clinicaltrials.gov/ct2/home
   [0443] Ill. See WO2007/005874 for antibody sequences, in particular the:
      [0444] i. Antibody having:

a. VH CDR1 = DYGFS
b. VH CDR2 = WITAYNGNTNYAQKLQG
c. VH CDR3 = DYFYGMDV
d. VL CDR1 = RASQSVSSYLV
e. VL CDR2 = DASNRAT
f. VL CDR3 = QQRSNWPRT

[0445] ii. Antibody having:

a. VH CDR1 = TYAIS
b. VH CDR2 = GIIPIFGKAHYAQKFQG
c. VH CDR3 = KFHFVSGSPFGMDV
d. VL CDR1 = RASQSVSSYLA
e. VL CDR2 = DASNRAT
f. VL CDR3 = QQRSNWPT

[0446] iii. Antibody having:

a. VH CDR1 = SYDVH
b. VH CDR2 = WLHADTGITKFSQKFQG
c. VH CDR3 = ERIQLWFDY
d. VL CDR1 = RASQGISSWLA
e. VL CDR2 = AASSLQS
f. VL CDR3 = QQYNSYPYT

c) durvalumab/MED14736
[0447] i. CAS Number→1428935-60-7
   [0448] (see http://www.cas.org/content/chemical-substances/fags)
[0449] ii. Unique Ingredient Identifier (UNII)→28×28×90 KV
   [0450] (see http://www.fda.gov/Forlndustry/DataStandards/SubstanceRegistration System-UniquelngredientldentifierUNII/default.htm)

iii. VH sequence
EVQLVESGGGLVQPGGSLRLSCAASGFTFSRYWMSWVRQA
PGKGLEWVANIKQDGSEKYYVDSVKGRFTISRDNAKNSLY
LQMNSLRAEDTAVYYCAREGGWFGELAFDYWGQGTLVTVS
S
iv. VL sequence
EIVLTQSPGTLSLSPGERATLSCRASQRVSSSYLAWYQQKP
GQAPRLLIYDASSRATGIPDRFSGSGSGTDFTLTISRLEPE
DFAVYYCQQYGSLPWTFGQGTKVEIK

[0451] d) Avelumab/MSB0010718C
   [0452] i. CAS Number→1537032-82-8
      [0453] (see http://www.cas.org/content/chemical-substances/faqs)
   [0454] ii. Unique Ingredient Identifier (UNII)→KXG2PJ5511
      [0455] (see http://www.fda.gov/Forlndustry/DataStandards/SubstanceRegistration System-UniqueIngredientIdentifierUNII/default.htm)

[0456] In some embodiments, PD-L1 polypeptide corresponds to Genbank accession no. AAF25807, version no. AAF25807.1, record update date: Mar. 10, 2010 10:14 PM. In one embodiment, the nucleic acid encoding PD1 polypeptide corresponds to Genbank accession no. AF177937, version no. AF177937.1, record update date: Mar. 10, 2010 10:14 PM. In some embodiments, PD1 polypeptide corresponds to Uniprot/Swiss-Prot accession No. Q9NZQ7.

[0457] GITR Agonists

[0458] The term “glucocorticoid-induced TNF receptor” (abbreviated herein as “GITR”), also known as TNF receptor superfamily 18 (TNFRSF18, CD357), TEASR, and 312C2, as used herein, refers to a member of the tumor necrosis factor/nerve growth factor receptor family. GITR is a 241 amino acid type I transmembrane protein characterized by three cysteine pseudo-repeats in the extracellular domain and specifically protects T-cell receptorinduced apoptosis, although it does not protect cells from other apoptotic signals, including Fas triggering, dexamethasone treatment, or UV irradiation (Nocentini, G., et al. (1997) Proc. Natl. Acad. Sci. USA 94:6216-622).

[0459] GITR activation increases resistance to tumors and viral infections, is involved in autoimmune/inflammatory processes and regulates leukocyte extravasation (Nocentini supra; Cuzzocrea, et al. (2004) J Leukoc. Biol. 76:933-940; Shevach, et al. (2006) Nat. Rev. Immunol. 6:613-618; Cuzzocrea, et al. (2006) J Immunol. I 77:631-641; and Cuzzocrea, et al. (2007) FASEB J 21:1 I 7-129). In tumor mouse models, agonist GITR antibody, DTA-I, was combined with an antagonist CTLA-4 antibody, and showed synergistic results in complete tumor regression of advanced stage tumors in some test group mice (Ko, et al. (2005) J Exp. Med. 7:885-891).

[0460] The nucleic acid and amino acid sequences of human GITR (hGITR), of which there are three splice variants, are known and can be found in, for example GenBank Accession Nos. gi:40354198 [NM_005092.3], gi:23238190 [NM_004195.3], gi:23238193 [NM_148901.1], and gi:23238196 [NM_148902.1].

[0461] “GITR agonist” means any chemical compound or biological molecule that stimulates an immune reaction through activation of GITR signalling. Also contemplated are soluble GITR-L proteins, a GITR binding partner.

[0462] To examine the extent of enhancement of, e.g., GITR activity, samples or assays comprising a given, e.g., protein, gene, cell, or organism, are treated with a potential activating or inhibiting agent and are compared to control samples treated with an inactive control molecule. Control samples are assigned a relative activity value of 100%. Inhibition is achieved when the activity value relative to the control is about 90% or less, typically 85% or less, more typically 80% or less, most typically 75% or less, generally 70% or less, more generally 65% or less, most generally 60% or less, typically 55% or less, usually 50% or less, more usually 45% or less, most usually 40% or less, preferably 35% or less, more preferably 30% or less, still more preferably 25% or less, and most preferably less than 20%. Activation is achieved when the activity value relative to the control is about 110%, generally at least 120%, more generally at least 140%, more generally at least 160%, often at least 180%, more often at least 2-fold, most often at least 2.5-fold, usually at least 5-fold, more usually at least 10-fold, preferably at least 20-fold, more preferably at least 40-fold, and most preferably over 40-fold higher.

[0463] Combining an ADC, which targets a first target protein (FTP) positive lymphomas and leukemias with GITR agonists is advantageous, because on the one hand the ADC will directly kill the FTP positive tumor cells, while on the other hand the GITR agonist will engage the patient's own immune system to eliminate the cancer cells. Next to FTP(+) tumor cells, target negative tumor cells in close proximity to FTP(+) tumor cells will potentially be killed by the bystander mechanism of the PBD-dimer released after cell kill of FTP(+) cells. Hence, the ADC will directly kill the tumor. The resulting release of tumor associated antigens from cells killed with the PBD dimer will trigger the immune system, which will be further enhanced by the use of a GITR agonist.

[0464] GITR (Glucocorticoid-Induced TNFR-Related protein) is expressed transiently on activated T-cells and expressed constitutively at high levels on T-regs with further induction following activation. GITR ligation via its ligand GITRL stimulates both proliferation and function of both effector and regulatory CD4+ T cells. This promotes T-cell survival, and differentiation into effector cells, while abrogating suppression. Therefore it will be beneficial to target a FTP(+) tumor with the ADC, causing the antigenic cell death, while the GITR agonist induces a stronger, durable immune response.

[0465] Specific GITR agonists suitable for use as secondary agents in the present disclosure include:
[0466] a) MED11873, a GITR ligand fusion protein developed by MedImmune
   [0467] See WO2016/196792, US20160304607
   [0468] NCI thesaurus code→C124651
      [0469] (see https://ncit.nci.nih.gov/ncitbrowser)
   [0470] See also clinical trial NCT023126110 at https://clinicaltrials.gov/ct2/home
   [0471] See Tigue N J, Bamber L, Andrews J, et al. MED11873, a potent, stabilized hexameric agonist of human GITR with regulatory T-cell targeting potential. Oncoimmunology. 2017; 6(3):e1280645. doi:10.1080/2162402X.2017.1280645.
[0472] b) INCAGN1876, is an agonist antibody targeting the glucocorticoid-induced TNFR-related protein, or GITR. Discovered during a collaboration with Ludwig Cancer Research. INCAGN1876 is being co-developed with
   [0473] See clinical trials NCT02583165 and NCT03277352 at https://clinicaltrials.gov/ct2/home
[0474] c) TRX518, a humanized agylcosylated (Fc disabled) IgG1 anti-GITR mAb with immune-modulating activity developed by Leap Therapeutics
   [0475] See WO2006/105021 for sequences 58, 60-63; and EP2175884 sequences 1-7:

VL comprising the sequence
(CDR underline):
EIVMTQSPATLSVSPGERATLSCKASQNVGTNVAWYQQKPGQ
APRLLIYSASYRYSGIPARFSGSGSGTEFTLTISSLQSEDFA
VYYCQQYNTDPLTFGGGTKVEIK
VH comprising the sequence
(CDR underline):
QVTLRESGPALVKPTQTLTLTCTFSGFSLSTSGMGVGWIRQPPG
KALEWLAHIWWDDDKYY [symbol] PSLKSRLTISKDTSKNQVVLTMTNMD
PVDTATYYCARTRRYFPFAYWGQGTLVTVS
QVTLRESGPALVKPTQTLTLTCTFSGFSLSTSGMGVGWIRQPPG
KALEWLAHIWWDDDKYY [symbol] PSLKSRLTISKDTSKNQVVLTMTNM
DPVDTATYYCARTRRYFPFAYWGQGTLVTVS

[0476] See clinical trials NCT01239134 and NCT02628574 at https://clinicaltrials.gov/ct2/home
[0477] NCI thesaurus code→C95023
[0478] (see https://ncit.nci.nih.gov/ncitbrowser)
[0479] d) GWN323, an anti-GITR agonistic monoclonal antibody, which activates GITRs found on multiple types of T-cells. GWN323 is developed by Novartis
   [0480] See WO2016/196792
   [0481] NCI thesaurus code→C128028
      [0482] (see https://ncit.nci.nih.gov/ncitbrowser)
   [0483] See clinical trial NCT02740270 at https://clinicaltrials.gov/ct2/home
[0484] e) MK-1248, a humanized IgG4 anti-human glucocorticoid-induced tumor necrosis factor receptor (GITR) agonistic monoclonal antibody (MoAb) with significantly reduced effector function
   [0485] See clinical trial NCT02553499 at https://clinicaltrials.gov/ct2/home
   [0486] MK-1248 has the same CDR as MK4166 (see Sukumar et al., Cancer Res. 2017)
[0487] f) MK-4166, a humanized IgG1 anti-human glucocorticoid-induced tumor necrosis factor receptor (GITR) agonistic monoclonal antibody (MoAb) with potential immunomodulating activity (see Sukumar et al., Cancer Res. 2017).
   [0488] See clinical trial NCT02132754 at https://clinicaltrials.gov/ct2/home
   [0489] See Sukumar, et al., (2017), Cancer Research. 77. canres.1439.2016. 10.1158/0008-5472.CAN-16-1439.
   [0490] NCI thesaurus code C116065
   [0491] (see https://ncit.nci.nih.gov/ncitbrowser/)
[0492] g) BMS-986156, An anti-human glucocorticoid-induced tumor necrosis factor receptor (GITR; tumor necrosis factor superfamily member 18; TNFRSF18; CD357) agonistic monoclonal antibody
   [0493] See clinical trial NCT02598960 at https://clinicaltrials.gov/ct2/home
   [0494] NCI thesaurus code C132267
   [0495] (see https://ncit.nci.nih.gov/ncitbrowser/)

[0496] Sequences of agonist anti-GITR antibodies are provided in WO2011/028683 and WO2006/105021.

[0497] In some embodiments, GITR polypeptide corresponds to Genbank accession no. AAD22635, version no. AAD22635.1, record update date: Mar. 10, 2010 09:42 PM. In one embodiment, the nucleic acid encoding GITR polypeptide corresponds to Genbank accession no. AF125304, version no. AF125304.1, record update date: Mar. 10, 2010 09:42 PM. In some embodiments, GITR polypeptide corresponds to Uniprot/Swiss-Prot accession No. Q9Y5U5.

[0498] OX40 Agonists

[0499] OX40 (CD134; TNFRSF4) is a member of the TNFR super-family and is expressed by CD4 and CD8 T cells during antigen-specific priming. OX40 expression is largely transient following TCR/CD3 cross-linking, and by the presence of inflammatory cytokines. In the absence of activating signals, relatively few mature T cell subsets express OX40 at biologically relevant levels. Generating optimal “killer” CD8 T cell responses requires T cell receptor activation plus co-stimulation, which can be provided through ligation of OX40 using a OX40 agonist. This activating mechanism augments T cell differentiation and cytolytic function leading to enhanced anti-tumor immunity. Therefore it will be beneficial to target a FTP(+) tumor with the ADC, causing the antigenic cell death, while the OX40 agonist induces a stronger, durable immune response.

[0500] The OX40 agonist may be selected from the group consisting of an OX40 agonist antibody, an OX40L agonist fragment, an OX40 oligomeric receptor, and an OX40 immunoadhesin. In some embodiments, the OX40 binding agonist is a trimeric OX40L-Fc protein.

[0501] In some embodiments, the OX40 binding agonist is an OX40L agonist fragment comprising one or more extracellular domains of OX40L. In some embodiments, the OX40 binding agonist is an OX40 agonist antibody that binds human OX40. In some embodiments, the OX40 agonist antibody depletes cells that express human OX40. In some embodiments, the OX40 agonist antibody depletes cells that express human OX40 in vitro. In some embodiments, the cells are CD4+ effector T cells. In some embodiments, the cells are Treg cells. In some embodiments, the depleting is by ADCC and/or phagocytosis. In some embodiments, the depleting is by ADCC. In some embodiments, the OX40 agonist antibody binds human OX40 with an affinity of less than or equal to about 1 nM. In some embodiments, the OX40 agonist antibody increases CD4+ effector T cell proliferation and/or increasing cytokine production by the CD4+ effector T cell as compared to proliferation and/or cytokine production prior to treatment with anti-human OX40 agonist antibody. In some embodiments, the cytokine is gamma interferon. In some embodiments, the OX40 agonist antibody increases memory T cell proliferation and/or increasing cytokine production by the memory cell. In some embodiments, the cytokine is gamma interferon. In some embodiments, the OX40 agonist antibody inhibits Treg function. In some embodiments, the OX40 agonist antibody inhibits Treg suppression of effector T cell function. In some embodiments, effector T cell function is effector T cell proliferation and/or cytokine production. In some embodiments, the effector T cell is a CD4+ effector T cell. In some embodiments, the OX40 agonist antibody increases OX40 signal transduction in a target cell that expresses OX40. In some embodiments, OX40 signal transduction is detected by monitoring NFkB downstream signalling.

[0502] “OX40 agonist” means any chemical compound or biological molecule that stimulates an immune reaction through iactivation of OX40 signalling.

[0503] To examine the extent of enhancement of, e.g., OX40 activity, samples or assays comprising a given, e.g., protein, gene, cell, or organism, are treated with a potential activating or inhibiting agent and are compared to control samples treated with an inactive control molecule. Control samples are assigned a relative activity value of 100%. Inhibition is achieved when the activity value relative to the control is about 90% or less, typically 85% or less, more typically 80% or less, most typically 75% or less, generally 70% or less, more generally 65% or less, most generally 60% or less, typically 55% or less, usually 50% or less, more usually 45% or less, most usually 40% or less, preferably 35% or less, more preferably 30% or less, still more preferably 25% or less, and most preferably less than 20%. Activation is achieved when the activity value relative to the control is about 110%, generally at least 120%, more generally at least 140%, more generally at least 160%, often at least 180%, more often at least 2-fold, most often at least 2.5-fold, usually at least 5-fold, more usually at least 10-fold, preferably at least 20-fold, more preferably at least 40-fold, and most preferably over 40-fold higher.

[0504] Combining an ADC, which targets a first target protein (FTP) positive lymphomas and leukemias with OX40 agonists is advantageous, because on the one hand the ADC will directly kill the FTP positive tumor cells, while on the other hand the OX40 agonist will engage the patient's own immune system to eliminate the cancer cells. Next to FTP(+) tumor cells, target negative tumor cells in close proximity to FTP(+) tumor cells will potentially be killed by the bystander mechanism of the PBD-dimer released after cell kill of FTP(+) cells. Hence, the ADC will directly kill the tumor. The resulting release of tumor associated antigens from cells killed with the PBD dimer will trigger the immune system, which will be further enhanced by the use of a OX40 agonist.

[0505] Specific OX40 agonists suitable for use as secondary agents in the present disclosure include:
[0506] a) MED10562 (aka Tavolixizumab, Tavolimab)
   [0507] i. CAS Number→1635395-25-3
      [0508] (see http://www.cas.org/content/chemical-substances/fags)
   [0509] ii. Unique Ingredient Identifier (UNII)→4LU9B48U4D
      [0510] (see http://www.fda.gov/ForIndustry/DataStandards/SubstanceRegistration System-UniquelngredientidentifierUNII/default.htm)
      [0511] See clinical trial NCT02318394 at https://clinicaltrials.gov/ct2/home
      [0512] As described in WO2015/095423, WO2015/153514, WO2016/073380 & WO2016/081384
      [0513] NCI thesaurus code→C120041
      [0514] (see https://ncit.nci.nih.gov/ncitbrowser/)

Heavy Chain sequence:
QVQLQESGPGLVKPSQTLSLTCAVYGGSFSSGYWN
WIRKHPGKGLEYIGYISYNGITYHNPSLKSRITIN
RDTSKNQYSLQLNSVTPEDTAVYYCARYKYDYDGG
HAMDYWGQGTLVTVSSASTKGPSVFPLAPSSKSTS
GGTAALGCLVKDYFPEPVTVSWNSGALTSGVHTFP
AVLQSSGLYSLSSVVTVPSSSLGTQTYICNVNHKP
SNTKVDKRVEPKSCDKTHTCPPCPAPELLGGPSVF
LFPPKPKDTLMISRTPEVTCWVDVSHEDPEVKFNV
VYVDGVEVHNAKTKPREEQYNSTYRVVSVLTVLHQ
DWLNGKEYKCKVSNKALPAPIEKTISKAKGQPREP
QVYTLPPSREEMTKNQVSLTCLVKGFYPSDIAVEW
ESNGQPENNYKTTPPVLDSDGSFFLYSKLTVDKSR
WQQGNVFSCSVMHEALHNHYTQKSLSLSPG
Light chain sequence:
DIQMTQSPSSLSASVGDRVTITCRASQDISNYLNW
YQQKPGKAPKLLIYYTSKLHSGVPSRFSGSGSGTD
YTLTISSLQPEDFATYYCQQGSALPWTFGQGTKVE
IKRTVAAPSVFIFPPSDEQLKSGTASVVCLLNNFY
PREAKVQWKVDNALQSGNSQESVTEQDSKDSTYSL
SSTLTLSKADYEKHKVYACEVTHQGLSSPVTKSFN
RGEC

[0515] b) MED16383 (Efizonerimod alfa)
   [0516] i. CAS Number→1635395-27-5
      [0517] (see http://www.cas.org/content/chemical-substances/fags)
   [0518] ii. Unique Ingredient Identifier (UNII)→1 MH7C2X8KE
      [0519] (see http://www.fda.gov/ForIndustry/DataStandards/SubstanceRegistration System-UniqueIngredientIdentifierUNII/default.htm)
      [0520] See clinical trial NCT02221960 at https://clinicaltrials.gov/ct2/home
      [0521] As described in WO2015/095423, WO2016/081384, and WO2016/189124
      [0522] NCI thesaurus code→C118282
      [0523] (see https://ncit.nci.nih.gov/ncitbrowser/)

Amino acid sequence (Seq ID no. 17
from W02016/189124):
ESKYGPPCPPCPAPEFLGGPSVFLFPPKPKDTLMIS
RTPEVTCVVVDVSQEDPEVQFNWYVDGVEVHNAKT
KPREEQFNSTYRVVSVLTVLHQDWLNGKEYKCKVS
NKGLPSSIEKTISKAKGQPREPQVYTLPPSQEEMT
KNQVSLTCLVKGFYPSDIAVEWESNGQPENNYKTT
PPVLDSDGSFFLYSRLTVDKSRWQEGNVFSCSVMH
EALHNHYTQKSLSLSLGKDQDKIEALSSKVQQLER
SIGLKDLAMADLEQKVLEMEASTQVSHRYPRIQSI
KVQFTEYKKEKGFILTSQKEDEIMKVQNNSVIINC
DGFYLISLKGYFSQEVNISLHYQKDEEPLFQLKKV
RSVNSLMVASLTYKDKVYLNVTTDNTSLDDFHVNG
GELILIHQNPGEFCVL

[0524] c) MOXR0916 (also known as RG7888, Pogalizumab), a humanized anti-OX40 monoclonal antibody
   [0525] i. CAS Number→1638935-72-4
      [0526] (see http://www.cas.org/content/chemical-substances/faqs)
   [0527] ii. Unique Ingredient Identifier (UNII)→C78148TF1D
      [0528] (see http://www.fda.gov/ForIndustry/DataStandards/SubstanceRegistration System-UniqueIngredientIdentifierUNII/default.htm)
   [0529] iii. NCI thesaurus code→C121376
      [0530] (see https://ncit.nci.nih.gov/ncitbrowser/)
[0531] d) OX40mAb24 (9B12)
   [0532] i. OX40mAb24 is a humanised version of 9B12. 9B12 is a murine IgGI, anti-OX40 mAb directed against the extracellular domain of human OX40 (CD134) (Weinberg, A. D., et al. J Immunother 29, 575-585 (2006)).
   [0533] ii. See WO2016/057667 Seq ID no.59 for OX40mAb24 VH sequence, no.29 for VL sequence (no.32 is an alternative VL):

VH sequence
QVQLQESGPGLVKPSQTLSLTCAVYGGSFSSGYWN
WIRKHPGKGLEYIGYISYNGITYHNPSLKSRITIN
RDTSKNQYSLQLNSVTPEDTAVYYCARYKYDYDGG
HAMDYWGQGTLVTVSS
VL sequence
DIQMTQSPSSLSASVGDRVTITCRASQDISNYLNW
YQQKPGKAPKLLIYYTSKLHSGVPSRFSGSGSGTD
YTLTISSLQPEDFATYYCQQGSALPWTFGQGTKVE
IK

[0534] e) INCAGN1949
   [0535] i. See Gonzalez et al. 2016, DOI: 10.1158/1538-7445.AM2016-3204
   [0536] ii. See clinical trial NCT02923349 at https://clinicaltrials.gov/ct2/home
   [0537] iii. Antibody sequences are disclosed in WO2016/179517 A1:
      [0538] i. In particular, an antibody comprising the sequences:

VH CDR1 → GSAMH
VH CDR2 → RIRSKANSYATAYAASVKG
VH CDR3 → GIYDSSGYDY
VL CDR1 → RSSQSLLHSNGYNYLD
VL CDR2 → LGSNRAS
VL CDR3 → MQALQTPLT

[0539] ii. Such as, an antibody comprising the sequences:

VH→
EVQLVESGGGLVQPGGSLKLSCAASGFTFSGSAMHWVRQA
SGKGLEVVVGRIRSKANSYATAYAASVKGRFTISRDDSKN
TAYLQMNSLKTEDTAVYYCTSGIYDSSGYDYWGQGTLVTV
SS
VL→
DIVMTQSPLSLPVTPGEPASISCRSSQSLLHSNGYNYLDW
YLQKPGQSPQLLIYLGSNRASGVPDRFSGSGSGTDFTLKI
SRVEAEDVGVYYCMQALQTPLTFGGGTKVEIK

[0540] g) GSK3174998, a humanized IgG1 agonistic anti-OX40 monoclonal antibody (mAb)
   [0541] See clinical trial NCT02528357 at https://clinicaltrials.gov/ct2/home
[0542] h) PF-04518600 (PF-8600) is an investigational, fully human, monoclonal antibody (mAb) that targets OX40 protein
   [0543] See patent WO 2017/130076 A1
   [0544] See clinical trial NCT02315066 at https://clinicaltrials.gov/ct2/home—NCI thesaurus code→C121927
      [0545] (see https://ncit.nci.nih.gov/ncitbrowser/)

[0546] In some embodiments, OX40 polypeptide corresponds to Genbank accession no. CAA53576, version no. CAA53576.1, record update date: Feb. 2, 2011 10:10 AM. In one embodiment, the nucleic acid encoding OX40 polypeptide corresponds to Genbank accession no. X75962, version no. X75962.1, record update date: Feb. 2, 2011 10:10 AM. In some embodiments, OX40 polypeptide corresponds to Uniprot/Swiss-Prot accession No. P43489.

[0547] CTLA Antagonist

[0548] CTLA4 (CD152) is expressed on activated T cells and serves as a co-inhibitor to keep T cell responses in check following CD28-mediated T cell activation. CTLA4 is believed to regulate the amplitude of the early activation of naive and memory T cells following TCR engagement and to be part of a central inhibitory pathway that affects both antitumor immunity and autoimmunity. CTLA4 is expressed exclusively on T cells, and the expression of its ligands CD80 (B7.1) and CD86 (B7.2), is largely restricted to antigen-presenting cells, T cells, and other immune mediating cells. Antagonistic anti-CTLA4 antibodies that block the CTLA4 signalling pathway have been reported to enhance T cell activation. One such antibody, ipilimumab, was approved by the FDA in 2011 for the treatment of metastatic melanoma. Another anti-CTLA4 antibody, tremelimumab, was tested in phase Ill trials for the treatment of advanced melanoma, but did not significantly increase the overall survival of patients compared to the standard of care (temozolomide or dacarbazine) at that time.

[0549] “CTLA4 agonist” means any chemical compound or biological molecule that stimulates an immune reaction through inhibition of CTLA4 signalling.

[0550] To examine the extent of enhancement of, e.g., CTLA4 activity, samples or assays comprising a given, e.g., protein, gene, cell, or organism, are treated with a potential activating or inhibiting agent and are compared to control samples treated with an inactive control molecule. Control samples are assigned a relative activity value of 100%. Inhibition is achieved when the activity value relative to the control is about 90% or less, typically 85% or less, more typically 80% or less, most typically 75% or less, generally 70% or less, more generally 65% or less, most generally 60% or less, typically 55% or less, usually 50% or less, more usually 45% or less, most usually 40% or less, preferably 35% or less, more preferably 30% or less, still more preferably 25% or less, and most preferably less than 20%. Activation is achieved when the activity value relative to the control is about 110%, generally at least 120%, more generally at least 140%, more generally at least 160%, often at least 180%, more often at least 2-fold, most often at least 2.5-fold, usually at least 5-fold, more usually at least 10-fold, preferably at least 20-fold, more preferably at least 40-fold, and most preferably over 40-fold higher.

[0551] Combining an ADC, which targets a first target protein (FTP) positive lymphomas and leukemias with CTLA4 inhibitors is advantageous, because on the one hand, the ADC will directly kill the FTP positive tumor cells, while on the other hand the CTLA4 inhibitor will engage the patient's own immune system to eliminate the cancer cells. Next to FTP(+) tumor cells, target negative tumor cells in close proximity to FTP(+) tumor cells will potentially be killed by the bystander mechanism of the PBD-dimer released after cell kill of FTP(+) cells. Hence, the ADC will directly kill the tumor. The resulting release of tumor associated antigens from cells killed with the PBD dimer will trigger the immune system, which will be further enhanced by the use of CTLA4 inhibitors expressed on a large proportion of tumour infiltrating lymphocytes (TILs) from many different tumour types.

[0552] The major function of CTLA4 (CD152) is to regulate the amplitude of the early stages of T cell activation, and as such it counteracts the activity of the T cell co-stimulatory receptor, CD28, In the tumor microenvironment. Blockade of the CTLA4 pathway may therefore enhance enhancement of effector CD4+ T cell activity, while it inhibits TReg cell-dependent immunosuppression. Therefore it will be beneficial to target a FTP(+) tumor with the ADC, causing the antigenic cell death, while the CTLA4 blockade induces a stronger immune, durable response.

[0553] Specific CTLA4 antagonists suitable for use as secondary agents in the present disclosure include:
[0554] a) ipilimumab
   [0555] i. CAS Number→477202-00-9
      [0556] (see http://www.cas.org/content/chemical-substances/faqs)
   [0557] ii. Unique Ingredient Identifier (UNII)→6T8C155666
      [0558] (see http://www.fda.gov/ForIndustry/DataStandards/SubstanceRegistration System-UnigueIngredientIdentifierUNII/default.htm)
[0559] b) Tremelimumab
   [0560] i. CAS Number→745013-59-6
      [0561] (see http://www.cas.org/content/chemical-substances/faqs)
   [0562] ii. Unique Ingredient Identifier (UNII)→QEN1X95CIX
      [0563] (see http://www.fda.gov/Forlndustry/DataStandards/SubstanceRegistration System-UniqueIngredientIdentifierUNII/default.htm)

iii. VH sequence
[SEQ ID NO. 1]
GVVQPGRSLRLSCAASGFTFSSYGMHWVRQAPGKGLEWVA
VIWYDGSNKYYADSVKGRFTISRDNSKNTLYLQMNSLRAE
DTAVYYCARDPRGATLYYYYYGMDVWGQGTTVTVSSASTK
GPSVFPLAPCSRSTSESTAALGCLVKDYFPEPVTVSWNSG
ALTSGVH
iv. VL sequence
[SEQ ID NO. 2]
PSSLSASVGDRVTITCRASQSINSYLDWYQQKPGKAPKLL
IYAASSLQSGVPSRFSGSGSGTDFTLTISSLQPEDFATYY
CQQYYSTPFTFGPGTKVEIKRTVAAPSVFIFPPSDEQLKS
GTASVVCLLNNFYPREAKV

[0564] In some embodiments, CTLA polypeptide corresponds to Genbank accession no. AAL07473, version no. AAL07473.1, record update date: Mar. 11, 2010 01:28 AM. In one embodiment, the nucleic acid encoding CTLA4 polypeptide corresponds to Genbank accession no. AF414120, version no. AF414120.1, record update date: Mar. 11, 2010 01:28 AM. In some embodiments, OX40 polypeptide corresponds to Uniprot/Swiss-Prot accession No. P16410.

[0565] Combination with Radiotherapy

[0566] The therapies described herein include those that induce or enhance a subject's immune response by, for example, targeting immune regulatory cells such as Treg cells with a CD25-ADC. The targeting of immune regulatory cells in this manner allows for a reduction in the negative regulation of the subject's immune responses to an existing or newly presented antigen.

[0567] The therapies described herein may therefore be advantageously combined with other therapies which induce or enhance a subject's immune response. In this context, preclinical and clinical data indicate that combination of CD25-ADC administration with radiotherapy will lead to significant clinical benefits.

[0568] The advantage is derived from the potential of radiotherapy to convert immunologically ‘cold’ tumors into ‘hot’ tumors by a combination of distinct mechanisms including: (a) increasing tumor immunogenicity via the upregulation of antigenic expression, antigen processing, major histocompatibility molecules, and costimulatory signals; (b) overcoming an immunosuppressive tumor microenvironment by shifting the cytokine balance in favor of immunostimulation (e.g. by increasing the production of immunostimulatory cytokines); (c) recruiting antigen-presenting and immune effector cells to the tumor microenvironment (see Ko et al., Ther Adv Med Oncol 2018, Vol. 10: 1-11, DOI: 10.1177/1758834018768240). The effect of this immunological conversion of tumours is then amplifies by the immune regulatory cell depletion resulting from CD25-ADC administration. Consistent with this, relapse and regrowth of tumours following radiotherapy and PD1 blockade is associated with Treg repopulation of the tumour microenvironment (Oweida et al., Clin Cancer Res Jul. 24 2018 DOI: 10.1158/1078-0432.CCR-18-1038).

[0569] Accordingly, in an aspect the CD25-ADCs described herein are administered in combination with radiotherapy.

[0570] As used herein, the terms “radiation therapy” or “radiotherapy” may refer to the medical use of ionizing radiation as part of cancer treatment to control or eradicate malignant cells. Radiotherapy may be used for curative, adjuvant, or palliative treatment. Suitable types of radiotherapy include conventional external beam radiotherapy, stereotactic radiation therapy (e.g., Axesse, Cyberknife, Gamma Knife, Novalis, Primatom, Synergy, X-Knife, TomoTherapy or Trilogy), Intensity-Modulated Radiation Therapy, particle therapy (e.g., proton therapy), brachytherapy, delivery of radioisotopes, intraoperative radiotherapy, Auger therapy, Volumetric modulated arc therapy (VMAT), Virtual simulation, 3-dimensional conformal radiation therapy, and intensity-modulated radiation therapy.

[0571] In one embodiment, radiatiotherapy uses high-energy radiation to shrink tumors and kill cancer cells. The radiation may be, for example, X-rays, gamma rays, or charged particles. Modes of cell killing through radiation include DNA damage either directly or by creating free radicals within cells that in turn damage DNA.

[0572] Radiation may be delivered by a machine outside the body (external-beam radiation therapy), or may come from radioactive material placed in the body near cancer cells (internal radiation therapy, also called brachy therapy). In one example of systemic radiation therapy, radioactive substances, such as radioactive iodine, are used which travel in the blood to kill cancer cells.

[0573] Preferably, the radiotherapy is administered in a regime designed to minimize any immunosuppressive effects of the radiation. For example, preclinical evidence indicates high radiation doses above 12-18 Gy result in an attenuation of tumor immunogenicity (Vanpouille-Box C., et al., Nat Commun 2017; 8: 15618). In addition, it is known that circulating lymphocytes are particularly radiosensitive (see Yovino S., et al., Cancer Invest 2013; 31: 140-144); this indicates radiotherapy regimes aimed at stimulating an anti-tumour immune response should aim to mimimise both (1) the amount of vasculature exposed in each treatment, and (2) the number of exposures in the treatment regime.

[0574] Radiation dosages may be fractionated and administered in sequence; for example, on consecutive days until the total desired radiation dose is delivered.

[0575] The CD25-ADC may be administered before the radiotherapy, simultaneous with the radiotherapy, or after the radiotherapy. Preferably the CD25-ADC is administered after the radiotherapy, for example the same day or the day after the completion of a radiotherapy dose.

[0576] Treated Disorders

[0577] The therapies described herein include those that induce or enhance a subject's immune response. In particular, in certain aspects the therapies include treating a disorder by inducing or enhancing the immune response of a subject against an antigen associated with the disorder.

[0578] In some aspects the therapies described herein enhance or induce an immune response by targeting immune regulatory cells with an antibody conjugated, i.e. covalently attached by a linker, to a PBD drug moiety, i.e. toxin. When the drug is not conjugated to an antibody, the PBD drug has a cytotoxic effect. The biological activity of the PBD drug moiety is thus modulated by conjugation to an antibody. The antibody-drug conjugates (ADC) of the disclosure selectively deliver an effective dose of a cytotoxic agent to the targeted tissue whereby greater selectivity, i.e. a lower efficacious dose, may be achieved. The targeting of immune regulatory cells in this manner allows for a reduction in the negative regulation of the subject's immune responses to an existing or newly presented antigen.

[0579] The methods described herein may be used in combination with other immune response stimulating agents in order to further enhance and/or induce an immune response. This approach is expected to have utility in, for example, highly immunosuppressive circumstances that are not overcome through use of a single immunostimulating agnet/method.

[0580] For example, molcules such as CD3/DAA bi-specific T-cell engagers (BiTEs) function to direct cytotoxic T-cells' cell-killing activity against target cells bearing a DAA. BiTEs therefore stimulate an immune reaction against DAA bearing cells (see Zimmerman et al., International Immunology, Volume 27, Issue 1, January 2015, Pages 31-37). A well known example of a BiTE is Blinatumomab—a CD3/CD19 BiTE used to treat CD19+ve B-cell linage cancers such as CLL and ALL (see Robinson et al. Blood 2018:blood-2018-02-830992).

[0581] However, the immune reaction stimulated by a BiTE may still be suppressed by, for example: (1) high levels of immune suppressive cells (see Ellerman, Methods, Volume 154, 1 Feb. 2019, Pages 102-117), and/or (2) activation of immune regulatory cells by the BiTE itself (see Koristka et al. 2015, Oncoimmunology. 2015 March; 4(3): e994441). Accordingly, the methods for reducing the immune-suppressive activity of a population of immune regulatory cells described herein may be usefully combined with, for example, BiTEs to further enhance the immune response against DAA bearing target cells. Such a combination will have particular utility in patient populations where the efficacy of a first immune stimulatory agent/method (eg. BiTE) is inhibited ro reduced by the immune-suppressive activity of a population of CD25+ve immune regulatory cells such as Tregs.

[0582] In some aspects the therapies described herein enhance or induce an immune response by directly killing target cells through cytotoxic ADC binding to the target cells and/or, through a ‘bystander effect’, indirectly killing target cells in the proximity of cells that are directly bound by the cytotoxic ADC (see, for example, WO/2016/083468). The killing of target cells causes the release of target antigens, ‘stranger signals’, and/or ‘danger signals’ into the extracellular environment where they can interact with and stimulate a subject's immune system (see, for example, Virgil E J C Schijns & Ed C Lavelle (2011) Expert Review of Vaccines, 10:4, 539-550).

[0583] Thus, in one aspect, the present disclosure provides a method of inducing or enhancing an immune response in a subject, the method comprising the step of administering a CD25-ADC to the subject. The induction or enhancement of immune response may be due to the reduction in the immune-suppressive activity of an immune regulatory cell population, as defined herein.

[0584] In one aspect, the present disclosure provides a method of treating or preventing a disorder a subject, wherein the disorder is characterized by a disorder-associated antigen (DAA), the method comprising administering a CD25-ADC to the subject.

[0585] In some aspects the CD25-ADC is administered in combination with a disorder-associated antigen (DAA). This may be done with a view to inducing or enhancing an immune response against the DAA and so treating the disorder associated with the co-administered DAA. The DAA may be a protein, polypeptide, peptide, peptide mimetic, nucleic acid encoding a protein, polypeptide, peptide, peptide mimetic, sugar, oligiosaccharide, lipid, phospholipid, liposaccharide, or lipoprotein. Typically the DAA is a cell-surface antigen, meaning that in its normal pathogenic context it is found on the surface of a cell or pathogen such that is accessible to cells and molecules of a subject's immune system.

[0586] In a further aspect there is also provided a CD25-ADC as described herein for use in inducing or enhancing an immune response in a subject, or for use in treating or preventing a disorder a subject wherein the disorder is characterized by a disorder-associated antigen (DAA). Another aspect of the present disclosure provides the use of a CD25-ADC as described herein in the manufacture of a medicament for inducing or enhancing an immune response in a subject, or for treating or preventing a disorder a subject wherein the disorder is characterized by a disorder-associated antigen (DAA).

[0587] One of ordinary skill in the art is readily able to determine whether or not a candidate therapy treats a particular disorder characterized by a disorder-associated antigen (DAA). For example, assays which may conveniently be used to assess the activity offered by a particular compound are described below.

[0588] The therapies described herein may be used to treat a proliferative disorder. The term “proliferative disorder” pertains to an unwanted or uncontrolled cellular proliferation of excessive or abnormal cells which is undesired, such as, neoplastic or hyperplastic growth, whether in vitro or in vivo.

[0589] Examples of proliferative conditions include, but are not limited to, benign, pre-malignant, and malignant cellular proliferation, including but not limited to, neoplasms and tumours (e.g. histocytoma, glioma, astrocyoma, osteoma), cancers (e.g. lung cancer, small cell lung cancer, gastrointestinal cancer, bowel cancer, colon cancer, breast carinoma, ovarian carcinoma, prostate cancer, testicular cancer, liver cancer, kidney cancer, bladder cancer, pancreas cancer, brain cancer, sarcoma, osteosarcoma, Kaposi's sarcoma, melanoma), lymphomas, leukemias, psoriasis, bone diseases, fibroproliferative disorders (e.g. of connective tissues), and atherosclerosis. Cancers of interest include, but are not limited to, leukemias and ovarian cancers.

[0590] Any type of cell may be treated, including but not limited to, lung, gastrointestinal (including, e.g. bowel, colon), breast (mammary), ovarian, prostate, liver (hepatic), kidney (renal), bladder, pancreas, brain, and skin.

[0591] Proliferative disorders of interest include, but are not limited to, Hodgkin's and non-Hodgkin's Lymphoma, including diffuse large B-cell lymphoma (DLBCL), follicular lymphoma, (FL), Mantle Cell lymphoma (MCL), chronic lymphatic lymphoma (CLL), Marginal Zone B-cell lymphoma (MZBL) and leukemias such as Hairy cell leukemia (HCL), Hairy cell leukemia variant (HCL-v), Acute Myeloid Leukaemia (AML), and Acute Lymphoblastic Leukaemia (ALL) such as Philadelphia chromosome-positive ALL (Ph+ALL) or Philadelphia chromosome-negative ALL (Ph-ALL) [Fielding A., Haematologica. 2010 January; 95(1): 8-12].

[0592] Proliferative disorders of particular interest include those associated with elevated numbers of regulatory immune cells, such as Treg cells. These include chronic lymphatic lymphoma (CLL), T-cell Acute Lymphoblastic Leukaemia (T-ALL), and B-cell non-Hodgkin's Lymphoma, such as Acute Myeloid Leukaemia (AML) [Niedzwiecki et al., J. Immun. R., Vol. 2018, Article ID 1292404].

[0593] Classical Hodgkins lymphoma includes the subtypes nodular sclerosing, lymphocyte predominant, lymphocyte depleted and mixed cellularity. The Hodgkins lymphoma subtype may not be defined. In certain aspects, the patients tested according to the methods here have Hodgkins lymphoma of the nodular sclerosing and mixed cellularity subtypes.

[0594] The proliferative disease may be characterised by the presence of a neoplasm comprising both CD25+ve and CD25−ve cells.

[0595] The proliferative disease may be characterised by the presence of a neoplasm composed of CD25−ve neoplastic cells, optionally wherein the CD25−ve neoplastic cells are associated with CD25+ve non-neoplastic cells such as CD25+ve Tregs.

[0596] The target neoplasm or neoplastic cells may be all or part of a solid tumour.

[0597] Solid tumors may be neoplasms, including non-haematological cancers, comprising or composed of CD25+ve neoplastic cells. Solid tumors may be neoplasms infiltrated with CD25+ve cells, such as CD25+ve Tregs; such solid tumours may lack expression of CD25 (that is, comprise or be composed of CD25-ve neoplastic cells).

[0598] For example, the solid tumour may be a tumour with high levels of infiltrating T-cells, such as infiltrating regulatory T-cells (Treg; Menetrier-Caux, C., et al., Targ Oncol (2012) 7:15-28; Arce Vargas et al., 2017, Immunity 46, 1-10; Tanaka, A., et al., Cell Res. 2017 January; 27(1):109-118). Accordingly, the solid tumour may be pancreatic cancer, breast cancer (including triple negative breast cancer), colorectal cancer, gastric and oesophageal cancer, melanoma, non-small cell lung cancer, ovarian cancer, hepatocellular carcinoma, renal cell carcinoma, bladder, and head and neck cancer.

[0599] The solid tumour may be a tumour with low levels of infiltrating T-cells, such as infiltrating regulatory T-cells.

[0600] Less preferably, the solid tumour may be a tumour that is not associated or infiltrated with CD25+ve cells, such as CD25+ve Tregs.

[0601] In some embodiments the high/low/no infiltrating T-cell status of a tumour is determined by measuring the ratio of T-regulatory cells/T-effector using, for example, FACS analusis of T-cells in a sample. In some embodiments the level of infiltrating T-cells is determined to be ‘high’ if the ratio of T-regulatory cells/T-effector is at least 20. In some embodiments the level of infiltrating T-cells is determined to be ‘low’ if the ratio of T-regulatory cells/T-effector is less than 20.

[0602] The neoplasm or neoplastic cells may be all or part of an established tumour. An ‘established tumour’ as described herein may be, for example, a tumour such as a solid tumour diagnosed or identified in a naïve subject.

[0603] In some cases the naïve subject is a subject that has not yet been treated to reduce the immune-suppressive activity of an immune regulatory cell population, as defined herein; for example; treated with an anti-CD25 antibody or a CD25-ADC. In some cases the naïve subject is a subject that has not yet been treated with ADCx25, as defined herein.

[0604] The neoplasm or neoplastic cells may be a circulating tumour or circulating tumour cells (CTC; Gupta et al. 2006, Cell. 127 (4): 679-95; Rack et al., 2014. Journal of the National Cancer Institute. 106 (5)). The CTCs may be, or comprise, metastatic cells (i.e. CTCs capable of establishing metastatic tumours in a subject).

[0605] It is contemplated that the therapies of the present disclosure may be used to treat various proliferative disorders. Exemplary conditions or hyperproliferative disorders include benign or malignant tumors; leukemia, haematological, and lymphoid malignancies. Others include neuronal, glial, astrocytal, hypothalamic, glandular, macrophagal, epithelial, stromal, blastocoelic, inflammatory, angiogenic and immunologic, including autoimmune disorders and graft-versus-host disease (GVHD).

[0606] Generally, the disease or disorder to be treated is a hyperproliferative disease such as cancer. Examples of cancer to be treated herein include, but are not limited to, carcinoma, lymphoma, blastoma, sarcoma, and leukemia or lymphoid malignancies. More particular examples of such cancers include squamous cell cancer (e.g. epithelial squamous cell cancer), lung cancer including small-cell lung cancer, non-small cell lung cancer, adenocarcinoma of the lung and squamous carcinoma of the lung, cancer of the peritoneum, hepatocellular cancer, gastric or stomach cancer including gastrointestinal cancer, pancreatic cancer, glioblastoma, cervical cancer, ovarian cancer, liver cancer, bladder cancer, hepatoma, breast cancer, colon cancer, rectal cancer, colorectal cancer, endometrial or uterine carcinoma, salivary gland carcinoma, kidney or renal cancer, prostate cancer, vulval cancer, thyroid cancer, hepatic carcinoma, anal carcinoma, penile carcinoma, as well as head and neck cancer.

[0607] It is contemplated that the therapies of the present disclosure may be used to treat any proliferative disorder that is characterized by a tumor-associated antigen (TAA). Typically, a TAA is an antigen that is either: (1) expressed only on neoplastic cells, or (2) expressed at higher levels by neoplastic cells as compared to non-neoplastic (i.e. normal cells). Often a TAA will be an antigen present on the surface of a neoplastic cell.

[0608] Tumour Associated Antigens

[0609] In some aspects, the TAA is selected from the group consisting of:

[0610] (1) BMPR1B (bone morphogenetic protein receptor-type IB)

[0611] Nucleotide

[0612] Genbank accession no. NM_001203

[0613] Genbank version no. NM_001203.2 GI:169790809

[0614] Genbank record update date: Sep. 23, 2012 02:06 PM

[0615] Polypeptide

[0616] Genbank accession no. NP_001194

[0617] Genbank version no. NP_001194.1 GI:4502431

[0618] Genbank record update date: Sep. 23, 2012 02:06 PM

### CROSS-REFERENCES

[0619] ten Dijke, P., et al Science 264 (5155): 101-104 (1994), Oncogene 14 10 (11):1377-1382 (1997)); WO2004/063362 (Claim 2); WO2003/042661 (Claim 12); US2003/134790-A1 (Page 38-39); WO2002/102235 (Claim 13; Page 296); WO2003/055443 (Page 91-92); WO2002/99122 (Example 2; Page 528-530); WO2003/029421 (Claim 6); WO2003/024392 (Claim 2; FIG. 112); WO2002/98358 (Claim 1; Page 183); WO2002/54940 (Page 100-101); WO2002/59377(Page 349-350); WO2002/30268 (Claim 27; Page 376); 15 WO2001/48204 (Example; FIG. 4); NP_001194 bone morphogenetic protein receptor, type IB/pid=NP_001194.1.; MIM:603248; AY065994

[0620] (2) E16 (LA T1, SLC7A5)

[0621] Nucleotide

[0622] Genbank accession no. NM_003486

[0623] Genbank version no. NM_003486.5 GI:71979931

[0624] Genbank record update date: Jun. 27, 2012 12:06 PM

[0625] Polypeptide

[0626] Genbank accession no. NP_003477

[0627] Genbank version no. NP_003477.4 GI:71979932

[0628] Genbank record update date: Jun. 27, 2012 12:06 PM

### CROSS REFERENCES

[0629] Biochem. Biophys. Res. Commun. 255 (2), 283-288 (1999), Nature 395 (6699):288-291 (1998), Gaugitsch, H. W., et 20 al (1992) J. Biol. Chem. 267 (16):11267-11273); WO2004/048938 (Example 2); WO2004/032842 (Example IV); WO2003/042661 (Claim 12); WO2003/016475 (Claim 1); WO2002/78524 (Example 2); WO2002/99074 (Claim 19; Page 127-129); WO2002/86443 (Claim 27; Pages 222, 393); WO2003/003906 (Claim 10; Page 293); WO2002/64798 (Claim 33; Page 93-95); WO2000/14228 (Claim 5; Page 133-136); US2003/224454 (FIG. 3); 25 WO2003/025138 (Claim 12; Page 150); NP_003477 solute carrier family 7 (cationic amino acid transporter, y+system), member 5/pid=NP_003477.3—Homo sapiens; MIM:600182; NM_015923.

[0630] (3) STEAP1 (Six Transmembrane Epithelial Antigen of Prostate)

[0631] Nucleotide

[0632] Genbank accession no. NM_012449

[0633] Genbank version no. NM_012449.2 GI:22027487

[0634] Genbank record update date: Sep. 9, 2012 02:57 PM

[0635] Polypeptide

[0636] Genbank accession no. NP_036581

[0637] Genbank version no. NP_036581.1 GI:9558759

[0638] Genbank record update date: Sep. 9, 2012 02:57 PM

### CROSS REFERENCES

[0639] Cancer Res. 61 (15), 5857-5860 (2001), Hubert, R. S., et al (1999) Proc. Natl. Acad. Sci. U.S.A. 96 (25):14523-14528); WO2004/065577 (Claim 6); WO2004/027049 (FIG. 1L); EP1394274 (Example 11); WO2004/016225 (Claim 2); WO2003/042661 (Claim 12); US2003/157089 (Example 5); US2003/185830 (Example 5); US2003/064397 (FIG. 2); WO2002/89747 (Example 5; Page 618-619); WO2003/022995 (Example 9; FIG. 13A, Example 53; Page 173, Example 2; FIG. 2A); six transmembrane epithelial antigen of the prostate; MIM:604415.

[0640] (4) 0772P (CA125, MUC16)

[0641] Nucleotide

[0642] Genbank accession no. AF361486

[0643] Genbank version no. AF361486.3 GI:34501466

[0644] Genbank record update date: Mar. 11, 2010 07:56 AM

[0645] Polypeptide

[0646] Genbank accession no. AAK74120

[0647] Genbank version no. AAK74120.3 GI:34501467

[0648] Genbank record update date: Mar. 11, 2010 07:56 AM

### CROSS REFERENCES

[0649] J. Biol. Chem. 276 (29):27371-27375 (2001)); WO2004/045553 (Claim 14); WO2002/92836 (Claim 6; FIG. 12); WO2002/83866 (Claim 15; Page 116-121); US2003/124140 (Example 16); GI:34501467;

[0650] (5) MPF (MPF, MSLN, SMR, Megakaryocyte Potentiating Factor, Mesothelin)

[0651] Nucleotide

[0652] Genbank accession no. NM_005823

[0653] Genbank version no. NM_005823.5 GI:293651528

[0654] Genbank record update date: Sep. 2, 2012 01:47 PM

[0655] Polypeptide

[0656] Genbank accession no. NP_005814

[0657] Genbank version no. NP_005814.2 GI:53988378

[0658] Genbank record update date: Sep. 2, 2012 01:47 PM

### CROSS REFERENCES

[0659] Yamaguchi, N., et al Biol. Chem. 269 (2), 805-808 (1994), Proc. Natl. Acad. Sci. U.S.A. 96 (20):11531-11536 (1999), Proc. Natl. Acad. Sci. U.S.A. 93 10 (1):136-140 (1996), J. Biol. Chem. 270 (37):21984-21990 (1995)); WO2003/101283 (Claim 14); (WO2002/102235 (Claim 13; Page 287-288); WO2002/101075 (Claim 4; Page 308-309); WO2002/71928 (Page 320-321); WO94/10312 (Page 52-57); IM:601051.

[0660] (6) Napi3b (NAPI-3B, NPTIIb, SLC34A2, solute carrier family 34 (sodium phosphate), member 2, type II sodium-dependent phosphate transporter 3b)

[0661] Nucleotide

[0662] Genbank accession no. NM_006424

[0663] Genbank version no. NM_006424.2 GI:110611905

[0664] Genbank record update date: Jul. 22, 2012 03:39 PM

[0665] Polypeptide

[0666] Genbank accession no. NP_006415

[0667] Genbank version no. NP_006415.2 GI:110611906

[0668] Genbank record update date: Jul. 22, 2012 03:39 PM

### CROSS REFERENCES

[0669] J. Biol. Chem. 277 (22):19665-19672 (2002), Genomics 62 (2):281-284 (1999), Feild, J. A., et al (1999) Biochem. Biophys. Res. Commun. 258 (3):578-582); WO2004/022778 (Claim 2); EP1394274 (Example 11); WO2002/102235 (Claim 13; Page 20 326); EP0875569 (Claim 1; Page 17-19); WO2001/57188 (Claim 20; Page 329); WO2004/032842 (Example IV); WO2001/75177 (Claim 24; Page 139-140); MIM:604217.

[0670] (7) Sema 5b (FLJ10372, KIAA1445, Mm.42015, SEMA5B, SEMAG, Semaphorin 5b Hlog, 25 sema domain, seven thrombospondin repeats (type 1 and type 1-like), transmembrane domain (TM) and short cytoplasmic domain, (semaphorin) 5B)

[0671] Nucleotide

[0672] Genbank accession no. AB040878

[0673] Genbank version no. AB040878.1 GI:7959148

[0674] Genbank record update date: Aug. 2, 2006 05:40 PM

[0675] Polypeptide

[0676] Genbank accession no. BAA95969

[0677] Genbank version no. BAA95969.1 GI:7959149

[0678] Genbank record update date: Aug. 2, 2006 05:40 PM

### CROSS REFERENCES

[0679] Nagase T., et al (2000) DNA Res. 7 (2):143-150); WO2004/000997 (Claim 1); WO2003/003984 (Claim 1); WO2002/06339 (Claim 1; Page 50); WO2001/88133 (Claim 1; Page 41-43, 48-58); WO2003/054152 (Claim 20); WO2003/101400 (Claim 11); Accession: 30 Q9P283; Genew; HGNC:10737

[0680] (8) PSCA hlg (2700050C12Rik, C530008016Rik, RIKEN cDNA 2700050C12, RIKEN cDNA 2700050C12 gene)

[0681] Nucleotide

[0682] Genbank accession no. AY358628

[0683] Genbank version no. AY358628.1 G1:37182377

[0684] Genbank record update date: Dec. 1, 2009 04:15 AM

[0685] Polypeptide

[0686] Genbank accession no. AAQ88991

[0687] Genbank version no. AAQ88991.1 GI:37182378

[0688] Genbank record update date: Dec. 1, 2009 04:15 AM

### CROSS REFERENCES

[0689] Ross et al (2002) Cancer Res. 62:2546-2553; US2003/129192 (Claim 2); US2004/044180 (Claim 12); US2004/044179 35 (Claim 11); US2003/096961 (Claim 11); US2003/232056 (Example 5); WO2003/105758 16 (Claim 12); US2003/206918 (Example 5); EP1347046 (Claim 1); WO2003/025148 (Claim 20); GI:37182378.

[0690] (9) ETBR (Endothelin type B receptor)

[0691] Nucleotide

[0692] Genbank accession no. AY275463

[0693] Genbank version no. AY275463.1 GI:30526094

[0694] Genbank record update date: Mar. 11, 2010 02:26 AM

[0695] Polypeptide

[0696] Genbank accession no. AAP32295

[0697] Genbank version no. AAP32295.1 GI:30526095

[0698] Genbank record update date: Mar. 11, 2010 02:26 AM

### CROSS REFERENCES

[0699] Nakamuta M., et al Biochem. Biophys. Res. Commun. 177, 34-39, 1991; Ogawa Y., et al Biochem. Biophys. Res. Commun. 178, 248-255, 1991; Arai H., et al Jpn. Circ. J. 56, 1303-1307, 1992; Arai H., et al J. Biol. Chem. 268, 3463-3470, 1993; Sakamoto A., Yanagisawa M., et al Biochem. Biophys. Res. Commun. 178, 656-663, 1991; Elshourbagy N. A., et al J. Biol. Chem. 268, 3873-3879, 1993; Haendler B., et al J. Cardiovasc. Pharmacol. 20, s1-S4, 1992; Tsutsumi M., et al Gene 228, 43-49, 1999; Strausberg R. L., et al Proc. Natl. Acad. Sci. U.S.A. 99, 16899-16903, 2002; Bourgeois C., et al J. Clin. Endocrinol. Metab. 82, 3116-3123, 1997; Okamoto Y., et al Biol. Chem. 272, 21589-21596, 1997; Verheij J.B., et al Am. J. Med. Genet. 108, 223-225, 2002; Hofstra R. M. W., et al Eur. J. Hum. Genet. 5, 180-185, 1997; Puffenberger E.G., et al Cell 79, 1257-1266, 1994; Attie T., et al, Hum. Mol. Genet. 4, 2407-15 2409, 1995; Auricchio A., et al Hum. Mol. Genet. 5:351-354, 1996; Amiel J., et al Hum. Mol. Genet. 5, 355-357, 1996; Hofstra R. M. W., et al Nat. Genet. 12, 445-447, 1996; Svensson P. J., et al Hum. Genet. 103, 145-148, 1998; Fuchs S., et al Mol. Med. 7, 115-124, 2001; Pingault V., et al (2002) Hum. Genet. 111, 198-206; WO2004/045516 (Claim 1); WO2004/048938 (Example 2); WO2004/040000 (Claim 151); WO2003/087768 (Claim 1); 20 WO2003/016475 (Claim 1); WO2003/016475 (Claim 1); WO2002/61087 (FIG. 1); WO2003/016494 (FIG. 6); WO2003/025138 (Claim 12; Page 144); WO2001/98351 (Claim 1; Page 124-125); EP0522868 (Claim 8; FIG. 2); WO2001/77172 (Claim 1; Page 297-299); US2003/109676; U.S. Pat. No. 6,518,404 (FIG. 3); U.S. Pat. No. 5,773,223 (Claim 1a; Col 31-34); WO2004/001004.

[0700] (10) MSG783 (RNF124, hypothetical protein FLJ20315)

[0701] Nucleotide

[0702] Genbank accession no. NM_017763

[0703] Genbank version no. NM_017763.4 GI:167830482

[0704] Genbank record update date: Jul. 22, 2012 12:34 AM

[0705] Polypeptide

[0706] Genbank accession no. NP_060233

[0707] Genbank version no. NP_060233.3 GI:56711322

[0708] Genbank record update date: Jul. 22, 2012 12:34 AM

### CROSS REFERENCES

[0709] WO2003/104275 (Claim 1); WO2004/046342 (Example 2); WO2003/042661 (Claim 12); WO2003/083074 (Claim 14; Page 61); WO2003/018621 (Claim 1); WO2003/024392 (Claim 2; FIG. 93); WO2001/66689 (Example 6); LocusID:54894.

[0710] (11) STEAP2 (HGNC_8639, IPCA-1, PCANAP1, STAMP1, STEAP2, STMP, prostate cancer associated gene 1, prostate cancer associated protein 1, six transmembrane epithelial antigen of prostate 2, six transmembrane prostate protein)

[0711] Nucleotide

[0712] Genbank accession no. AF455138

[0713] Genbank version no. AF455138.1 GI:22655487

[0714] Genbank record update date: Mar. 11, 2010 01:54 AM

[0715] Polypeptide

[0716] Genbank accession no. AAN04080

[0717] Genbank version no. AAN04080.1 GI:22655488

[0718] Genbank record update date: Mar. 11, 2010 01:54 AM

### CROSS REFERENCES

[0719] Lab. Invest. 82 (11):1573-1582 (2002)); WO2003/087306; US2003/064397 (Claim 1; FIG. 1); WO2002/72596 (Claim 13; Page 54-55); WO2001/72962 (Claim 1; FIG. 4B); 35 WO2003/104270 (Claim 11); WO2003/104270 (Claim 16); US2004/005598 (Claim 22); WO2003/042661 (Claim 12); US2003/060612 (Claim 12; FIG. 10); WO2002/26822 (Claim 23; FIG. 2); WO2002/16429 (Claim 12; FIG. 10); GI:22655488.

[0720] (12) TrpM4 (BR22450, FLJ20041, TRPM4, TRPM4B, transient receptor potential cation 5 channel, subfamily M, member 4)

[0721] Nucleotide

[0722] Genbank accession no. NM_017636

[0723] Genbank version no. NM_017636.3 GI:304766649

[0724] Genbank record update date: Jun. 29, 2012 11:27 AM

[0725] Polypeptide

[0726] Genbank accession no. NP_060106

[0727] Genbank version no. NP_060106.2 GI:21314671

[0728] Genbank record update date: Jun. 29, 2012 11:27 AM

### CROSS REFERENCES

[0729] Xu, X. Z., et al Proc. Natl. Acad. Sci. U.S.A. 98 (19):10692-10697 (2001), Cell 109 (3):397-407 (2002), J. Biol. Chem. 278 (33):30813-30820 (2003)); US2003/143557 (Claim 4); WO2000/40614 (Claim 14; Page 100-103); WO2002/10382 (Claim 1; FIG. 9A); WO2003/042661 (Claim 12); WO2002/30268 (Claim 27; Page 391); US2003/219806 (Claim 4); WO2001/62794 (Claim 10 14; FIG. 1A-D); MIM:606936.

[0730] (13) CRIPTO (CR, CR1, CRGF, CRIPTO, TDGF1, teratocarcinoma-derived growth factor)

[0731] Nucleotide

[0732] Genbank accession no. NM_003212

[0733] Genbank version no. NM_003212.3 GI:292494881

[0734] Genbank record update date: Sep. 23, 2012 02:27 PM

[0735] Polypeptide

[0736] Genbank accession no. NP_003203

[0737] Genbank version no. NP_003203.1 GI:4507425

[0738] Genbank record update date: Sep. 23, 2012 02:27 PM

### CROSS REFERENCES

[0739] Ciccodicola, A., et al EMBO J. 8 (7):1987-1991 (1989), Am. J. Hum. Genet. 49 (3):555-565 (1991)); US2003/224411 (Claim 1); WO2003/083041 (Example 1); WO2003/034984 (Claim 12); WO2002/88170 (Claim 2; Page 52-53); WO2003/024392 (Claim 2; FIG. 58); WO2002/16413 (Claim 1; Page 94-95, 105); WO2002/22808 (Claim 2; FIG. 1); U.S. Pat. No. 5,854,399 (Example 2; Col 17-18); U.S. Pat. No. 5,792,616 (FIG. 2); MIM:187395.

[0740] (14) CD21 (CR2 (Complement receptor 2) or C3DR (C3d/Epstein Barr virus receptor) or Hs.73792)

[0741] Nucleotide

[0742] Genbank accession no M26004

[0743] Genbank version no. M26004.1 GI:181939

[0744] Genbank record update date: Jun. 23, 2010 08:47 AM

[0745] Polypeptide

[0746] Genbank accession no. AAA35786

[0747] Genbank version no. AAA35786.1 GI:181940

[0748] Genbank record update date: Jun. 23, 2010 08:47 AM

### CROSS REFERENCES

[0749] Fujisaku et al (1989) J. Biol. Chem. 264 (4):2118-2125); Weis J. J., et al J. Exp. Med. 167, 1047-1066, 1988; Moore M., et al Proc. Natl. Acad. Sci. U.S.A. 84, 9194-9198, 1987; Barel M., et al Mol. Immunol. 35, 1025-1031, 1998; Weis J. J., et al Proc. Natl. Acad. Sci. U.S.A. 83, 5639-5643, 1986; Sinha S. K., et al (1993) J. Immunol. 150, 5311-5320; WO2004/045520 (Example 4); US2004/005538 (Example 1); WO2003/062401 (Claim 9); WO2004/045520 (Example 4); WO91/02536 (FIGS. 9.1-9.9); WO2004/020595 (Claim 1); Accession: P20023; Q13866; Q14212; EMBL; M26004; AAA35786.1.

[0750] (15) CD79b (CD79B, CD79β, IGb (immunoglobulin-associated beta), B29)

[0751] Nucleotide

[0752] Genbank accession no NM_000626

[0753] Genbank version no. NM_000626.2 GI:90193589

[0754] Genbank record update date: Jun. 26, 2012 01:53 PM

[0755] Polypeptide

[0756] Genbank accession no. NP_000617

[0757] Genbank version no. NP_000617.1 GI:11038674

[0758] Genbank record update date: Jun. 26, 2012 01:53 PM

### CROSS REFERENCES

[0759] Proc. Natl. Acad. Sci. U.S.A. (2003) 100 (7):4126-4131, Blood (2002) 100 (9):3068-3076, Muller et al (1992) Eur. J. Immunol. 22 (6):1621-1625); WO2004/016225 (claim 2, FIG. 140); WO2003/087768, US2004/101874 (claim 1, page 102); WO2003/062401 (claim 9); WO2002/78524 (Example 2); US2002/150573 (claim 35 5, page 15); U.S. Pat. No. 5,644,033; WO2003/048202 (claim 1, pages 306 and 309); WO 99/58658, U.S. Pat. No. 6,534,482 (claim 13, FIG. 17A/B); WO2000/55351 (claim 11, pages 1145-1146); MIM:147245

[0760] (16) FcRH2 (IFGP4, IRTA4, SPAP1A (SH2 domain containing phosphatase anchor protein 5 1a), SPAP1B, SPAP1C)

[0761] Nucleotide

[0762] Genbank accession no NM_030764

[0763] Genbank version no. NM_030764.3 GI:227430280

[0764] Genbank record update date: Jun. 30, 2012 12:30 AM

[0765] Polypeptide

[0766] Genbank accession no. NP_110391

[0767] Genbank version no. NP_110391.2 GI:19923629

[0768] Genbank record update date: Jun. 30, 2012 12:30 AM

### CROSS REFERENCES

[0769] AY358130); Genome Res. 13 (10):2265-2270 (2003), Immunogenetics 54 (2):87-95 (2002), Blood 99 (8):2662-2669 (2002), Proc. Natl. Acad. Sci. U.S.A. 98 (17):9772-9777 (2001), Xu, M. J., et al (2001) Biochem. Biophys. Res. Commun. 280 (3):768-775; WO2004/016225 (Claim 2); WO2003/077836; WO2001/38490 (Claim 5; FIG. 18D-1-18D-2); WO2003/097803 (Claim 12); 10 WO2003/089624 (Claim 25); MIM:606509.

[0770] (17) HER2 (ErbB2)

[0771] Nucleotide

[0772] Genbank accession no M11730

[0773] Genbank version no. M11730.1 GI:183986

[0774] Genbank record update date: Jun. 23, 2010 08:47 AM

[0775] Polypeptide

[0776] Genbank accession no. AAA75493

[0777] Genbank version no. AAA75493.1 GI:306840

[0778] Genbank record update date: Jun. 23, 2010 08:47 AM

### CROSS REFERENCES

[0779] Coussens L., et al Science (1985) 230(4730):1132-1139); Yamamoto T., et al Nature 319, 230-234, 1986; Semba K., et al Proc. Natl. Acad. Sci. U.S.A. 82, 6497-6501, 1985; Swiercz J. M., et al J. Cell Biol. 165, 869-15 880, 2004; Kuhns J. J., et al J. Biol. Chem. 274, 36422-36427, 1999; Cho H.-S., et al Nature 421, 756-760, 2003; Ehsani A., et al (1993) Genomics 15, 426-429; WO2004/048938 (Example 2); WO2004/027049 (FIG. 11); WO2004/009622; WO2003/081210; WO2003/089904 (Claim 9); WO2003/016475 (Claim 1); US2003/118592; WO2003/008537 (Claim 1); WO2003/055439 (Claim 29; FIG. 1A-B); WO2003/025228 (Claim 37; FIG. 5C); 20 WO2002/22636 (Example 13; Page 95-107); WO2002/12341 (Claim 68; FIG. 7); WO2002/13847 (Page 71-74); WO2002/14503 (Page 114-117); WO2001/53463 (Claim 2; Page 41-46); WO2001/41787 (Page 15); WO2000/44899 (Claim 52; FIG. 7); WO2000/20579 (Claim 3; FIG. 2); U.S. Pat. No. 5,869,445 (Claim 3; Col 31-38); WO9630514 (Claim 2; Page 56-61); EP1439393 (Claim 7); WO2004/043361 (Claim 7); WO2004/022709; WO2001/00244 25 (Example 3; FIG. 4); Accession: P04626; EMBL; M11767; AAA35808.1. EMBL; M11761; AAA35808.1

[0780] Antibodies

[0781] Abbott: US20110177095
[0782] For example, an antibody comprising CDRs having overall at least 80% sequence identity to CDRs having amino acid sequences of SEQ ID NO:3 (CDR-H1), SEQ ID NO:4 (CDR-H2), SEQ ID NO:5 (CDR-H3), SEQ ID NO:104 and/or SEQ ID NO:6 (CDR-L1), SEQ ID NO:7 (CDR-L2), and SEQ ID NO:8 (CDR-L3), wherein the anti-HER2 antibody or anti-HER2 binding fragment has reduced immunogenicity as compared to an antibody having a VH of SEQ ID NO:1 and a VL of SEQ ID NO:2.

[0783] Biogen: US20100119511
[0784] For example, ATCC accession numbers: PTA-10355, PTA-10356, PTA-10357, PTA-10358
[0785] For example, a purified antibody molecule that binds to HER2 comprising a all six CDR's from an antibody selected from the group consisting of BIIB71F10 (SEQ ID NOs:11, 13), B11B69A09 (SEQ ID NOs:15, 17); BIIB67F10 (SEQ ID NOs:19, 21); BIIB67F11 (SEQ ID NOs:23, 25), B11B66A12 (SEQ ID NOs:27, 29), BIIB66C01 (SEQ ID NOs:31, 33), BIIB65C10 (SEQ ID NOs:35, 37), B11B65H09 (SEQ ID NOs:39, 41) and B11B65B03 (SEQ ID NOs:43, 45), or CDRs which are identical or which have no more than two alterations from said CDRs.

[0786] Herceptin (Genentech)—U.S. Pat. No. 6,054,297; ATCC accession no. CRL-10463 (Genentech)

[0787] Pertuzumab (Genentech)
[0788] US20110117097
   [0789] for example, see SEQ IDs No. 15&16, SEQ IDs No. 17&18, SEQ IDs No. 23&24 & ATCC accession numbers HB-12215, HB-12216, CRL 10463, HB-12697.
[0790] US20090285837
[0791] US20090202546
   [0792] for example, ATCC accession numbers: HB-12215, HB-12216, CRL 10463, H B-12698.
[0793] US20060088523
   [0794] for example, ATCC accession numbers: HB-12215, HB-12216
   [0795] for example, an antibody comprising the variable light and variable heavy amino acid sequences in SEQ ID Nos. 3 and 4, respectively.
   [0796] for example, an antibody comprising a light chain amino acid sequence selected from SEQ ID No. 15 and 23, and a heavy chain amino acid sequence selected from SEQ ID No. 16 and 24
[0797] US20060018899
   [0798] for example, ATCC accession numbers: (7C2) HB-12215, (7F3) HB-12216, (4D5) CRL-10463, (2C4) HB-12697.
   [0799] for example, an antibody comprising the amino acid sequence in SEQ ID No. 23, or a deamidated and/or oxidized variant thereof.
[0800] US2011/0159014
   [0801] for example, an antibody having a light chain variable domain comprising the hypervariable regions of SEQ ID NO: 1”.
   [0802] For example, an antibody having a heavy chain variable domain comprising the hypervariable regions of SEQ ID NO: 2.
[0803] US20090187007

[0804] Glycotope: TrasGEX antibody http://www.glycotope.com/pipeline
[0805] For example, see International Joint Cancer Institute and Changhai Hospital Cancer Cent: HMTI-Fc Ab—Gao J., et al BMB Rep. 2009 Oct. 31; 42(10):636-41.

[0806] Symphogen: US20110217305
[0807] Union Stem Cell &Gene Engineering, China—Liu H Q., et al Xi Bao Yu Fen Zi Mian YiXue Za Zhi. 2010 May; 26(5):456-8.

[0808] (18) NCA (CEACAM6)

[0809] Nucleotide

[0810] Genbank accession no M18728

[0811] Genbank version no. M18728.1 GI:189084

[0812] Genbank record update date: Jun. 23, 2010 08:48 AM

[0813] Polypeptide

[0814] Genbank accession no. AAA59907

[0815] Genbank version no. AAA59907.1 GI:189085

[0816] Genbank record update date: Jun. 23, 2010 08:48 AM

### CROSS REFERENCES

[0817] Barnett T., et al Genomics 3, 59-66, 1988; Tawaragi Y., et al Biochem. Biophys. Res. Commun. 150, 89-96, 1988; Strausberg R. L., et al Proc. Natl. Acad. Sci. U.S.A. 99:16899-16903, 2002; WO2004/063709; EP1439393 (Claim 7); WO2004/044178 (Example 4); WO2004/031238; WO2003/042661 (Claim 12); WO2002/78524 (Example 2); WO2002/86443 (Claim 27; Page 427); WO2002/60317 (Claim 2); Accession: P40199; Q14920; EMBL; M29541; AAA59915.1. EMBL; M18728.

[0818] (19) MDP (DPEP1)

[0819] Nucleotide

[0820] Genbank accession no BC017023

[0821] Genbank version no. BC017023.1 GI:16877538

[0822] Genbank record update date: Mar. 6, 2012 01:00 PM

[0823] Polypeptide

[0824] Genbank accession no. AAH17023

[0825] Genbank version no. AAH17023.1 GI:16877539

[0826] Genbank record update date: Mar. 6, 2012 01:00 PM

### CROSS REFERENCES

[0827] Proc. Natl. Acad. Sci. U.S.A. 99 (26):16899-16903 (2002)); WO2003/016475 (Claim 1); WO2002/64798 (Claim 33; Page 85-87); JP05003790 (FIG. 6-8); WO99/46284 (FIG. 9); MIM:179780.

[0828] (20) IL20R-alpha (IL20Ra, ZCYTOR7)

[0829] Nucleotide

[0830] Genbank accession no AF184971

[0831] Genbank version no. AF184971.1 GI:6013324

[0832] Genbank record update date: Mar. 10, 2010 10:00 PM

[0833] Polypeptide

[0834] Genbank accession no. AAF01320

[0835] Genbank version no. AAF01320.1 GI:6013325

[0836] Genbank record update date: Mar. 10, 2010 10:00 PM

### CROSS REFERENCES

[0837] Clark H.F., et al Genome Res. 13, 2265-2270, 2003; Mungall A. J., et al Nature 425, 805-811, 2003; Blumberg H., et al Cell 104, 9-19, 2001; Dumoutier L., et al J. Immunol. 167, 3545-3549, 2001; Parrish-Novak J., et al J. Biol. Chem. 277, 47517-47523, 2002; Pletnev S., et al (2003) 10 Biochemistry 42:12617-12624; Sheikh F., et al (2004) J. Immunol. 172, 2006-2010; EP1394274 (Example 11); US2004/005320 (Example 5); WO2003/029262 (Page 74-75); WO2003/002717 (Claim 2; Page 63); WO2002/22153 (Page 45-47); US2002/042366 (Page 20-21); WO2001/46261 (Page 57-59); WO2001/46232 (Page 63-65); WO98/37193 (Claim 1; Page 55-59); Accession: Q9UHF4; Q6UWA9; Q96SH8; EMBL; AF184971; AAF01320.1.

[0838] (21) Brevican (BCAN, BEHAB)

[0839] Nucleotide

[0840] Genbank accession no AF229053

[0841] Genbank version no. AF229053.1 GI:10798902

[0842] Genbank record update date: Mar. 11, 2010 12:58 AM

[0843] Polypeptide

[0844] Genbank accession no. AAG23135

[0845] Genbank version no. AAG23135.1 GI:10798903

[0846] Genbank record update date: Mar. 11, 2010 12:58 AM

### CROSS REFERENCES

[0847] Gary S.C., et al Gene 256, 139-147, 2000; Clark H.F., et al Genome Res. 13, 2265-2270, 2003; Strausberg R. L., et al Proc. Natl. Acad. Sci. U.S.A. 99, 16899-16903, 2002; US2003/186372 (Claim 11); US2003/186373 (Claim 11); US2003/119131 (Claim 1; FIG. 52); US2003/119122 (Claim 1; 20 FIG. 52); US2003/119126 (Claim 1); US2003/119121 (Claim 1; FIG. 52); US2003/119129 (Claim 1); US2003/119130 (Claim 1); US2003/119128 (Claim 1; FIG. 52); US2003/119125 (Claim 1); WO2003/016475 (Claim 1); WO2002/02634 (Claim 1)

[0848] (22) EphB2R (DRT, ERK, Hek5, EPHT3, Tyro5)

[0849] Nucleotide

[0850] Genbank accession no NM_004442

[0851] Genbank version no. NM_004442.6 GI:111118979

[0852] Genbank record update date: Sep. 8, 2012 04:43 PM

[0853] Polypeptide

[0854] Genbank accession no. NP_004433

[0855] Genbank version no. NP_004433.2 GI:21396504

[0856] Genbank record update date: Sep. 8, 2012 04:43 PM

### CROSS REFERENCES

[0857] Chan, J. and Watt, V. M., Oncogene 6 (6), 1057-1061 (1991) Oncogene 10 (5):897-905 (1995), Annu. Rev. Neurosci. 21:309-345 (1998), Int. Rev. Cytol. 196:177-244 (2000)); WO2003042661 (Claim 12); WO200053216 (Claim 1; Page 41); WO2004065576 (Claim 1); WO2004020583 (Claim 9); WO2003004529 (Page 128-132); WO200053216 (Claim 1; Page 42); MIM:600997.

[0858] (23) ASLG659 (B7h)

[0859] Nucleotide

[0860] Genbank accession no. AX092328

[0861] Genbank version no. AX092328.1 GI:13444478

[0862] Genbank record update date: Jan. 26, 2011 07:37 AM

### CROSS REFERENCES

[0863] US2004/0101899 (Claim 2); WO2003104399 (Claim 11); WO2004000221 (FIG. 3); US2003/165504 (Claim 1); US2003/124140 (Example 2); US2003/065143 (FIG. 60); WO2002/102235 (Claim 13; Page 299); US2003/091580 (Example 2); WO2002/10187 (Claim 6; FIG. 10); WO2001/94641 (Claim 12; FIG. 7b); WO2002/02624 (Claim 13; FIG. 1A-1B); US2002/034749 (Claim 54; Page 45-46); WO2002/06317 (Example 2; Page 320-321, Claim 34; Page 321-322); WO2002/71928 (Page 468-469); WO2002/02587 (Example 1; FIG. 1); WO2001/40269 (Example 3; Pages 190-192); WO2000/36107 (Example 2; Page 205-207); WO2004/053079 (Claim 12); WO2003/004989 (Claim 1); WO2002/71928 (Page 233-234, 452-453); WO 01/16318.

[0864] (24) PSCA (Prostate stem cell antigen precursor)

[0865] Nucleotide

[0866] Genbank accession no AJ297436

[0867] Genbank version no. AJ297436.1 GI:9367211

[0868] Genbank record update date: Feb. 1, 2011 11:25 AM

[0869] Polypeptide

[0870] Genbank accession no. CAB97347

[0871] Genbank version no. CAB97347.1 GI:9367212

[0872] Genbank record update date: Feb. 1, 2011 11:25 AM

### CROSS REFERENCES

[0873] Reiter R. E., et al Proc. Natl. Acad. Sci. U.S.A. 95, 1735-1740, 1998; Gu Z., et al Oncogene 19, 1288-1296, 2000; Biochem. Biophys. Res. Commun. (2000) 275(3):783-788; WO2004/022709; EP1394274 (Example 11); US2004/018553 (Claim 17); WO2003/008537 (Claim 1); WO2002/81646 (Claim 1; Page 164); WO2003/003906 (Claim 10; Page 288); WO2001/40309 (Example 1; FIG. 17); US2001/055751 (Example 1; FIG. 1b); WO2000/32752 (Claim 18; FIG. 1); WO98/51805 (Claim 17; Page 97); WO98/51824 (Claim 10; Page 94); WO98/40403 (Claim 2; FIG. 1B); Accession: 043653; EMBL; AF043498; AAC39607.1

[0874] (25) GEDA

[0875] Nucleotide

[0876] Genbank accession no AY260763

[0877] Genbank version no. AY260763.1 GI:30102448

[0878] Genbank record update date: Mar. 11, 2010 02:24 AM

[0879] Polypeptide

[0880] Genbank accession no. AAP14954

[0881] Genbank version no. AAP14954.1 GI:30102449

[0882] Genbank record update date: Mar. 11, 2010 02:24 AM

### CROSS REFERENCES

[0883] AP14954 lipoma HMGIC fusion-partnerlike protein/pid=AAP14954.1—Homo sapiens (human); WO2003/054152 (Claim 20); WO2003/000842 (Claim 1); WO2003/023013 (Example 3, Claim 20); US2003/194704 (Claim 45); GI:30102449;

[0884] (26) BAFF-R (B cell—activating factor receptor, BLyS receptor 3, BR3)

[0885] Nucleotide

[0886] Genbank accession no AF116456

[0887] Genbank version no. AF116456.1 GI:4585274

[0888] Genbank record update date: Mar. 10, 2010 09:44 PM

[0889] Polypeptide

[0890] Genbank accession no. AAD25356

[0891] Genbank version no. AAD25356.1 GI:4585275

[0892] Genbank record update date: Mar. 10, 2010 09:44 PM

### CROSS REFERENCES

[0893] BAFF receptor/pid=NP_443177.1—Homo sapiens: Thompson, J. S., et al Science 293 (5537), 2108-2111 (2001); WO2004/058309; WO2004/011611; WO2003/045422 (Example; Page 32-33); WO2003/014294 (Claim 35; FIG. 6B); WO2003/035846 (Claim 70; Page 615-616); WO2002/94852 (Col 136-137); WO2002/38766 25 (Claim 3; Page 133); WO2002/24909 (Example 3; FIG. 3); MIM:606269; NP_443177.1; NM_052945_1; AF132600

[0894] (27) CD22 (B-cell receptor CD22-B isoform, BL-CAM, Lyb-8, Lyb8, SIGLEC-2, FLJ22814)

[0895] Nucleotide

[0896] Genbank accession no AK026467

[0897] Genbank version no. AK026467.1 GI:10439337

[0898] Genbank record update date: Sep. 11, 2006 11:24 PM

[0899] Polypeptide

[0900] Genbank accession no. BAB15489

[0901] Genbank version no. BAB15489.1 GI:10439338

[0902] Genbank record update date: Sep. 11, 2006 11:24 PM

### CROSS REFERENCES

[0903] Wilson et al (1991) J. Exp. Med. 173:137-146; 30 WO2003/072036 (Claim 1; FIG. 1); IM:107266; NP_001762.1; NM_001771_1.

[0904] (27a) CD22 (CD22 molecule)

[0905] Nucleotide

[0906] Genbank accession no X52785

[0907] Genbank version no. X52785.1 GI:29778

[0908] Genbank record update date: Feb. 2, 2011 10:09 AM

[0909] Polypeptide

[0910] Genbank accession no. CAA36988

[0911] Genbank version no. CAA36988.1 GI:29779

[0912] Genbank record update date: Feb. 2, 2011 10:09 AM

### CROSS REFERENCES

[0913] Stamenkovic I. et al., Nature 345 (6270), 74-77 (1990)??

[0914] Other Information

[0915] Official Symbol: CD22

[0916] Other Aliases: SIGLEC-2, SIGLEC2

[0917] Other Designations: B-cell receptor CD22; B-lymphocyte cell adhesion molecule; BL-CAM; CD22 antigen; T-cell surface antigen Leu-14; sialic acid binding Ig-like lectin 2; sialic acid-binding Ig-like lectin 2

[0918] Antibodies

[0919] G5/44 (Inotuzumab): DiJoseph J F., et al Cancer Immunol Immunother. 2005 January; 54(1):11-24.

[0920] Epratuzumab-Goldenberg D M., et al Expert Rev Anticancer Ther. 6(10): 1341-53, 2006.

[0921] (28) CD79a (CD79A, CD79alpha), immunoglobulin-associated alpha, a B cell-specific protein that covalently interacts with Ig beta (CD79B) and forms a complex on the surface with Ig M 35 molecules, transduces a signal involved in B-cell differentiation), pl: 4.84, MW: 25028 TM: 2

[0922] [P] Gene Chromosome: 19q13.2).

[0923] Nucleotide

[0924] Genbank accession no NM_001783

[0925] Genbank version no. NM_001783.3 GI:90193587

[0926] Genbank record update date: Jun. 26, 2012 01:48 PM

[0927] Polypeptide

[0928] Genbank accession no. NP_001774

[0929] Genbank version no. NP_001774.1 GI:4502685

[0930] Genbank record update date: Jun. 26, 2012 01:48 PM

### CROSS REFERENCES

[0931] WO2003/088808, US2003/0228319; WO2003/062401 (claim 9); US2002/150573 (claim 4, pages 13-14); WO99/58658 (claim 13, FIG. 16); WO92/07574 (FIG. 1); U.S. Pat. No. 5,644,033; Ha et al (1992) J. Immunol. 148(5):1526-1531; Müller et al (1992) Eur. J. Immunol.. 22:1621-1625; Hashimoto et al (1994) Immunogenetics 40(4):287-295; Preud'homme et al (1992) Clin. Exp. 5 Immunol. 90(1):141-146; Yu et al (1992) J. Immunol. 148(2) 633-637; Sakaguchi et al (1988) EMBO J. 7(11):3457-3464

[0932] (29) CXCR5 (Burkitt's lymphoma receptor 1, a G protein-coupled receptor that is activated by the CXCL13 chemokine, functions in lymphocyte migration and humoral defense, plays a 10 role in HIV-2 infection and perhaps development of AIDS, lymphoma, myeloma, and leukemia); 372 aa, pl: 8.54 MW: 41959 TM: 7 [P] Gene Chromosome: 11q23.3,

[0933] Nucleotide

[0934] Genbank accession no NM_001716

[0935] Genbank version no. NM_001716.4 GI:342307092

[0936] Genbank record update date: Sep. 30, 2012 01:49 PM

[0937] Polypeptide

[0938] Genbank accession no. NP_001707

[0939] Genbank version no. NP_001707.1 GI:4502415

[0940] Genbank record update date: Sep. 30, 2012 01:49 PM

### CROSS REFERENCES

[0941] WO2004/040000; WO2004/015426; US2003/105292 (Example 2); U.S. Pat. No. 6,555,339 (Example 2); WO2002/61087 (FIG. 1); WO2001/57188 (Claim 20, page 269); WO2001/72830 (pages 12-13); WO2000/22129 (Example 1, pages 152-153, 15 Example 2, pages 254-256); WO99/28468 (claim 1, page 38); U.S. Pat. No. 5,440,021 (Example 2, col 49-52); WO94/28931 (pages 56-58); WO92/17497 (claim 7, FIG. 5); Dobner et al (1992) Eur. J. Immunol. 22:2795-2799; Barella et al (1995) Biochem. J. 309:773-779

[0942] (30) HLA-DOB (Beta subunit of MHC class II molecule (Ia antigen) that binds peptides and 20 presents them to CD4+ T lymphocytes); 273 aa, pl: 6.56, MW: 30820.TM: 1 [P] Gene Chromosome: 6p21.3)

[0943] Nucleotide

[0944] Genbank accession no NM_002120

[0945] Genbank version no. NM_002120.3 GI:118402587

[0946] Genbank record update date: Sep. 8, 2012 04:46 PM

[0947] Polypeptide

[0948] Genbank accession no. NP_002111

[0949] Genbank version no. NP_002111.1 GI:4504403

[0950] Genbank record update date: Sep. 8, 2012 04:46 PM

### CROSS REFERENCES

[0951] Tonnelle et al (1985) EMBO J. 4(11):2839-2847; Jonsson et al (1989) Immunogenetics 29(6):411-413; Beck et al (1992) J. Mol. Biol. 228:433-441; Strausberg et al (2002) Proc. Natl. Acad. Sci USA 99:16899-16903; Servenius et al (1987) J. Biol. Chem. 262:8759-8766; Beck et al (1996) J. Mol. Biol. 25 255:1-13; Naruse et al (2002) Tissue Antigens 59:512-519; WO99/58658 (claim 13, FIG. 15); U.S. Pat. No. 6,153,408 (Col 35-38); U.S. Pat. No. 5,976,551 (col 168-170); U.S. Pat. No. 6,011,146 (col 145-146); Kasahara et al (1989) Immunogenetics 30(1):66-68; Larhammar et al (1985) J. Biol. Chem. 260(26):14111-14119

[0952] (31) P2X5 (Purinergic receptor P2X ligand-gated ion channel 5, an ion channel gated by extracellular ATP, may be involved in synaptic transmission and neurogenesis, deficiency may contribute to the pathophysiology of idiopathic detrusor instability); 422 aa), pl: 7.63, MW: 47206 TM: 1 [P] Gene Chromosome: 17p13.3).

[0953] Nucleotide

[0954] Genbank accession no NM_002561

[0955] Genbank version no. NM_002561.3 GI:325197202

[0956] Genbank record update date: Jun. 27, 2012 12:41 AM

[0957] Polypeptide

[0958] Genbank accession no. NP_002552

[0959] Genbank version no. NP_002552.2 GI:28416933

[0960] Genbank record update date: Jun. 27, 2012 12:41 AM

### CROSS REFERENCES

[0961] Le et al (1997) FEBS Lett. 418(1-2):195-199; WO2004/047749; WO2003/072035 (claim 10); Touchman et al (2000) Genome Res. 10:165-173; WO2002/22660 (claim 20); WO2003/093444 (claim 1); WO2003/087768 (claim 1); WO2003/029277 (page 82)

[0962] (32) CD72 (B-cell differentiation antigen CD72, Lyb-2); 359 aa, pl: 8.66, MW: 40225, TM: 1 5 [P] Gene Chromosome: 9p13.3).

[0963] Nucleotide

[0964] Genbank accession no NM_001782

[0965] Genbank version no. NM_001782.2 GI:194018444

[0966] Genbank record update date: Jun. 26, 2012 01:43 PM

[0967] Polypeptide

[0968] Genbank accession no. NP_001773

[0969] Genbank version no. NP_001773.1 GI:4502683

[0970] Genbank record update date: Jun. 26, 2012 01:43 PM

### CROSS REFERENCES

[0971] WO2004042346 (claim 65); WO2003/026493 (pages 51-52, 57-58); WO2000/75655 (pages 105-106); Von Hoegen et al (1990) J. Immunol. 144(12):4870-4877; Strausberg et al (2002) Proc. Natl. Acad. Sci USA 99:16899-16903.

[0972] (33) LY64 (Lymphocyte antigen 64 (RP105), type I membrane protein of the leucine rich repeat (LRR) family, regulates B-cell activation and apoptosis, loss of function is associated with increased disease activity in patients with systemic lupus erythematosis); 661 aa, pl: 6.20, MW: 74147 TM: 1 [P] Gene Chromosome: 5q12).

[0973] Nucleotide

[0974] Genbank accession no NM_005582

[0975] Genbank version no. NM_005582.2 GI:167555126

[0976] Genbank record update date: Sep. 2, 2012 01:50 PM

[0977] Polypeptide

[0978] Genbank accession no. NP_005573

[0979] Genbank version no. NP_005573.2 GI:167555127

[0980] Genbank record update date: Sep. 2, 2012 01:50 PM

### CROSS REFERENCES

[0981] US2002/193567; WO97/07198 (claim 11, pages 39-42); Miura et al (1996) 15 Genomics 38(3):299-304; Miura et al (1998) Blood 92:2815-2822; WO2003/083047; WO97/44452 (claim 8, pages 57-61); WO2000/12130 (pages 24-26).

[0982] (34) FcRH1 (Fc receptor-like protein 1, a putative receptor for the immunoglobulin Fc domain that contains C2 type Ig-like and ITAM domains, may have a role in B-lymphocyte 20 differentiation); 429 aa, pl: 5.28, MW: 46925 TM: 1 [P] Gene Chromosome: 1q21-1q22)

[0983] Nucleotide

[0984] Genbank accession no NM_052938

[0985] Genbank version no. NM_052938.4 GI:226958543

[0986] Genbank record update date: Sep. 2, 2012 01:43 PM

[0987] Polypeptide

[0988] Genbank accession no. NP_443170

[0989] Genbank version no. NP_443170.1 GI:16418419

[0990] Genbank record update date: Sep. 2, 2012 01:43 PM

### CROSS REFERENCES

[0991] WO2003/077836; WO2001/38490 (claim 6, FIG. 18E-1-18-E-2); Davis et al (2001) Proc. Natl. Acad. Sci USA 98(17):9772-9777; WO2003/089624 (claim 8); EP1347046 (claim 1); WO2003/089624 (claim 7).

[0992] (35) IRTA2 (Immunoglobulin superfamily receptor translocation associated 2, a putative immunoreceptor with possible roles in B cell development and lymphomagenesis; deregulation of the gene by translocation occurs in some B cell malignancies); 977 aa, pl: 6.88, MW: 106468, TM: 1 [P] Gene Chromosome: 1q21)

[0993] Nucleotide

[0994] Genbank accession no AF343662

[0995] Genbank version no. AF343662.1 GI:13591709

[0996] Genbank record update date: Mar. 11, 2010 01:16 AM

[0997] Polypeptide

[0998] Genbank accession no. AAK31325

[0999] Genbank version no. AAK31325.1 GI:13591710

[1000] Genbank record update date: Mar. 11, 2010 01:16 AM

### CROSS REFERENCES

[1001] AF343663, AF343664, AF343665, AF369794, AF397453, AK090423, AK090475, AL834187, AY358085; Mouse:AK089756, AY158090, AY506558; NP_112571.1; WO2003/024392 (claim 2, FIG. 97); Nakayama et al (2000) Biochem. Biophys. Res. Commun. 277(1):124-127; WO2003/077836; WO2001/38490 (claim 3, FIG. 18B-1-18B-2).

[1002] (36) TENB2 (TMEFF2, tomoregulin, TPEF, HPP1, TR, putative transmembrane 35 proteoglycan, related to the EGF/heregulin family of growth factors and follistatin); 374 aa)

[1003] Nucleotide

[1004] Genbank accession no AF179274

[1005] Genbank version no. AF179274.2 GI:12280939

[1006] Genbank record update date: Mar. 11, 2010 01:05 AM

[1007] Polypeptide

[1008] Genbank accession no. AAD55776

[1009] Genbank version no. AAD55776.2 GI:12280940

[1010] Genbank record update date: Mar. 11, 2010 01:05 AM

### CROSS REFERENCES

[1011] NCBI Accession: AAD55776, AAF91397, AAG49451, NCBI RefSeq: NP_057276; NCBI Gene: 23671; OMIM: 605734; SwissProt Q9UIK5; AY358907, CAF85723, CQ782436; WO2004/074320; JP2004113151; WO2003/042661; WO2003/009814; EP1295944 (pages 69-70); WO2002/30268 (page 329); WO2001/90304; US2004/249130; US2004/022727; WO2004/063355; US2004/197325; US2003/232350; 5 US2004/005563; US2003/124579; Horie et al (2000) Genomics 67:146-152; Uchida et al (1999) Biochem. Biophys. Res. Commun. 266:593-602; Liang et al (2000) Cancer Res. 60:4907-12; Glynne-Jones et al (2001) Int J Cancer. October 15; 94(2):178-84.

[1012] (37) PSMA-FOLH1 (Folate hydrolase (prostate-specific membrane antigen) 1)

[1013] Nucleotide

[1014] Genbank accession no M99487

[1015] Genbank version no. M99487.1 GI:190663

[1016] Genbank record update date: Jun. 23, 2010 08:48 AM

[1017] Polypeptide

[1018] Genbank accession no. AAA60209

[1019] Genbank version no. AAA60209.1 GI:190664

[1020] Genbank record update date: Jun. 23, 2010 08:48 AM

### CROSS REFERENCES

[1021] Israeli R. S., et al Cancer Res. 53 (2), 227-230 (1993)

[1022] Other Information

[1023] Official Symbol: FOLH1

[1024] Other Aliases: GIG27, FGCP, FOLH, GCP2, GCPII, NAALAD1, NAALAdase, PSM, PSMA, mGCP

[1025] Other Designations: N-acetylated alpha-linked acidic dipeptidase 1; N-acetylated-alpha-linked acidic dipeptidase I; NAALADase I; cell growth-inhibiting gene 27 protein; folylpoly-gamma-glutamate carboxypeptidase; glutamate carboxylase II; glutamate carboxypeptidase 2; glutamate carboxypeptidase II; membrane glutamate carboxypeptidase; prostate specific membrane antigen variant F; pteroylpoly-gamma-glutamate carboxypeptidase

[1026] Antibodies

[1027] U.S. Pat. No. 7,666,425:

[1028] Antibodies produces by Hybridomas having the following ATCC references:ATCC accession No. HB-12101, ATCC accession No. HB-12109, ATCC accession No. HB-12127 and ATCC accession No. HB-12126.

[1029] Proscan: a monoclonal antibody selected from the group consisting of 8H12, 3E11, 17G1, 29B4, 30C1 and 20F2 (U.S. Pat. No. 7,811,564; Moffett S., et al Hybridoma (Larchmt). 2007 December; 26(6):363-72).

[1030] Cytogen: monoclonal antibodies 7E11-C5 (ATCC accession No. HB 10494) and 9H10-A4 (ATCC accession No. HB11430)—U.S. Pat. No. 5,763,202

[1031] GlycoMimetics: NUH2—ATCC accession No. HB 9762 (U.S. Pat. No. 7,135,301)

[1032] Human Genome Science: HPRAJ70—ATCC accession No. 97131 (U.S. Pat. No. 6,824,993); Amino acid sequence encoded by the cDNA clone (HPRAJ70) deposited as American Type Culture Collection (“ATCC”) Deposit No. 97131

[1033] Medarex: Anti-PSMA antibodies that lack fucosyl residues—U.S. Pat. No. 7,875,278

[1034] Mouse anti-PSMA antibodies include the 3F5.4G6, 3D7.1.1, 4E10-1.14, 3E11, 4D8, 3E6, 3C9, 2C7, 1G3, 3C4, 3C6, 4D4, 1G9, 5C8B9, 3G6, 4C8B9, and monoclonal antibodies. Hybridomas secreting 3F5.4G6, 3D7.1.1, 4E10-1.14, 3E11, 4D8, 3E6, 3C9, 2C7, 1G3, 3C4, 3C6, 4D4, 1 G9, 5C8B9, 3G6 or 4C8B9 have been publicly deposited and are described in U.S. Pat. No. 6,159,508. Relevant hybridomas have been publicly deposited and are described in U.S. Pat. No. 6,107,090. Moreover, humanized anti-PSMA antibodies, including a humanized version of J591, are described in further detail in PCT Publication WO 02/098897.

[1035] Other mouse anti-human PSMA antibodies have been described in the art, such as mAb 107-1A4 (Wang, S. et al. (2001) Int. J. Cancer 92:871-876) and mAb 2C9 (Kato, K. et al. (2003) Int. J. Urol. 10:439-444).

[1036] Examples of human anti-PSMA monoclonal antibodies include the 4A3, 7F12, 8C12, 8A11, 16F9, 2A10, 2C6, 2F5 and 1C3 antibodies, isolated and structurally characterized as originally described in PCT Publications WO 01/09192 and WO 03/064606 and in U.S. Provisional Application Ser. No. 60/654,125, entitled “Human Monoclonal Antibodies to Prostate Specific Membrane Antigen (PSMA)”, filed on Feb. 18, 2005. The V.sub.H amino acid sequences of 4A3, 7F12, 8C12, 8A11, 16F9, 2A10, 2C6, 2F5 and 1C3 are shown in SEQ ID NOs: 1-9, respectively. The V.sub.L amino acid sequences of 4A3, 7F12, 8C12, 8A11, 16F9, 2A10, 2C6, 2F5 and 1C3 are shown in SEQ ID NOs: 10-18, respectively.

[1037] Other human anti-PSMA antibodies include the antibodies disclosed in PCT Publication WO 03/034903 and US Application No. 2004/0033229.

[1038] NW Biotherapeutics: A hybridoma cell line selected from the group consisting of 3F5.4G6 having ATCC accession number HB12060, 3D7-1.1. having ATCC accession number HB12309, 4E10-1.14 having ATCC accession number HB12310, 3E11 (ATCC HB12488), 4D8 (ATCC HB12487), 3E6 (ATCC HB12486), 3C9 (ATCC HB12484), 2C7 (ATCC HB12490), 1G3 (ATCC HB12489), 3C4 (ATCC HB12494), 3C6 (ATCC HB12491), 4D4 (ATCC HB12493), 1G9 (ATCC HB12495), 5C8B9 (ATCC HB12492) and 3G6 (ATCC HB12485)—see U.S. Pat. No. 6,150,508

[1039] PSMA Development Company/Progenics/Cytogen—Seattle Genetics: mAb 3.9, produced by the hybridoma deposited under ATCC Accession No. PTA-3258 or mAb 10.3, produced by the hybridoma deposited under ATCC Accession No. PTA-3347—U.S. Pat. No. 7,850,971

[1040] PSMA Development Company—Compositions of PSMA antibodies (US 20080286284, Table 1)
[1041] This application is a divisional of U.S. patent application Ser. No. 10/395,894, filed on Mar. 21, 2003 (U.S. Pat. No. 7,850,971)

[1042] University Hospital Freiburg, Germany—mAbs 3/A12, 3/E7, and 3/F11 (Wolf P., et al Prostate. 2010 Apr. 1; 70(5):562-9).

[1043] (38) SST (Somatostatin Receptor; note that there are 5 subtypes)

[1044] (38.1) SSTR2 (Somatostatin receptor 2)

[1045] Nucleotide

[1046] Genbank accession no NM_001050

[1047] Genbank version no. NM_001050.2 GI:44890054

[1048] Genbank record update date: Aug. 19, 2012 01:37 PM

[1049] Polypeptide

[1050] Genbank accession no. NP_001041

[1051] Genbank version no. NP_001041.1 GI:4557859

[1052] Genbank record update date: Aug. 19, 2012 01:37 PM

### CROSS REFERENCES

[1053] Yamada Y., et al Proc. Natl. Acad. Sci. U.S.A. 89 (1), 251-255 (1992); Susini C., et al Ann Oncol. 2006 December; 17(12):1733-42

[1054] Other Information

[1055] Official Symbol: SSTR2

[1056] Other Designations: SRIF-1; SS2R; somatostatin receptor type 2

[1057] (38.2) SSTR5 (Somatostatin receptor 5)

[1058] Nucleotide

[1059] Genbank accession no D16827

[1060] Genbank version no. D16827.1 GI:487683

[1061] Genbank record update date: Aug. 1, 2006 12:45 PM

[1062] Polypeptide

[1063] Genbank accession no. BAA04107

[1064] Genbank version no. BAA04107.1 GI:487684

[1065] Genbank record update date: Aug. 1, 2006 12:45 PM

### CROSS REFERENCES

[1066] Yamada, Y., et al Biochem. Biophys. Res. Commun. 195 (2), 844-852 (1993)

[1067] Other Information

[1068] Official Symbol: SSTR5

[1069] Other Aliases: SS-5-R

[1070] Other Designations: Somatostatin receptor subtype 5; somatostatin receptor type 5

[1071] (38.3) SSTR1

[1072] (38.4) SSTR3

[1073] (38.5) SSTR4

[1074] AvB6—Both Subunits (39+40)

[1075] (39) ITGAV (Integrin, alpha V;

[1076] Nucleotide

[1077] Genbank accession no M14648 J02826 M18365

[1078] Genbank version no. M14648.1 GI:340306

[1079] Genbank record update date: Jun. 23, 2010 08:56 AM

[1080] Polypeptide

[1081] Genbank accession no. AAA36808

[1082] Genbank version no. AAA36808.1 GI:340307

[1083] Genbank record update date: Jun. 23, 2010 08:56 AM

### CROSS REFERENCES

[1084] Suzuki S., et al Proc. Natl. Acad. Sci. U.S.A. 83 (22), 8614-8618 (1986)

[1085] Other Information

[1086] Official Symbol: ITGAV

[1087] Other Aliases: CD51, MSK8, VNRA, VTNR

[1088] Other Designations: antigen identified by monoclonal antibody L230; integrin alpha-V; integrin alphaVbeta3; integrin, alpha V (vitronectin receptor, alpha polypeptide, antigen CD51); vitronectin receptor subunit alpha

[1089] (40) ITGB6 (Integrin, beta 6)

[1090] Nucleotide

[1091] Genbank accession no NM_000888

[1092] Genbank version no. NM_000888.3 GI:9966771

[1093] Genbank record update date: Jun. 27, 2012 12:46 AM

[1094] Polypeptide

[1095] Genbank accession no. NP_000879

[1096] Genbank version no. NP_000879.2 GI:9625002

[1097] Genbank record update date: Jun. 27, 2012 12:46 AM

### CROSS REFERENCES

[1098] Sheppard D. J., et al Biol. Chem. 265 (20), 11502-11507 (1990)

[1099] Other Information

[1100] Official Symbol: ITGB6

[1101] Other Designations: integrin beta-6

[1102] Antibodies

[1103] Biogen: U.S. Pat. No. 7,943,742—Hybridoma clones 6.3G9 and 6.8G6 were deposited with the ATCC, accession numbers ATCC PTA-3649 and -3645, respectively.

[1104] Biogen: U.S. Pat. No. 7,465,449—In some embodiments, the antibody comprises the same heavy and light chain polypeptide sequences as an antibody produced by hybridoma 6.1A8, 6.3G9, 6.8G6, 6.2B1, 6.2B10, 6.2A1, 6.2E5, 7.1G10, 7.7G5, or 7.1C5.

[1105] Centocor (J&J): U.S. Pat. Nos. 7,550,142; 7,163,681
[1106] For example in U.S. Pat. No. 7,550,142—an antibody having human heavy chain and human light chain variable regions comprising the amino acid sequences shown in SEQ ID NO: 7 and SEQ ID NO: 8.

[1107] Seattle Genetics: 15H3 (Ryan M C., et al Cancer Res Apr. 15, 2012; 72(8 Supplement): 4630)

[1108] (41) CEACAM5 (Carcinoembryonic antigen-related cell adhesion molecule 5)

[1109] Nucleotide

[1110] Genbank accession no M17303

[1111] Genbank version no. M17303.1 GI:178676

[1112] Genbank record update date: Jun. 23, 2010 08:47 AM

[1113] Polypeptide

[1114] Genbank accession no. AAB59513

[1115] Genbank version no. AAB59513.1 GI:178677

[1116] Genbank record update date: Jun. 23, 2010 08:47 AM

### CROSS REFERENCES

[1117] Beauchemin N., et al Mol. Cell. Biol. 7 (9), 3221-3230 (1987)

[1118] Other Information

[1119] Official Symbol: CEACAM5

[1120] Other Aliases: CD66e, CEA

[1121] Other Designations: meconium antigen 100

[1122] Antibodies

[1123] AstraZeneca-Medlmmune:US 20100330103; US20080057063;
[1124] US20020142359
   [1125] for example an antibody having complementarity determining regions (CDRs) with the following sequences: heavy chain; CDR1—DNYMH, CDR2—WIDPENGDTE YAPKFRG, CDR3—LIYAGYLAMD Y; and light chain CDR1—SASSSVTYMH, CDR2—STSNLAS, CDR3—QQRSTYPLT.
   [1126] Hybridoma 806.077 deposited as European Collection of Cell Cultures (ECACC) deposit no. 96022936.

[1127] Research Corporation Technologies, Inc.:U.S. Pat. No. 5,047,507

[1128] Bayer Corporation: U.S. Pat. No. 6,013,772

[1129] BioAlliance: U.S. Pat. Nos. 7,982,017; 7,674,605
[1130] U.S. Pat. No. 7,674,605
   [1131] an antibody comprising the heavy chain variable region sequence from the amino acid sequence of SEQ ID NO: 1, and the light chain variable region sequence from the amino acid sequence of SEQ ID NO:2.
   [1132] an antibody comprising the heavy chain variable region sequence from the amino acid sequence of SEQ ID NO:5, and the light chain variable region sequence from the amino acid sequence of SEQ ID NO:6.

[1133] Celltech Therapeutics Limited: U.S. Pat. No. 5,877,293

[1134] The Dow Chemical Company: U.S. Pat. Nos. 5,472,693; 6,417,337; 6,333,405
[1135] U.S. Pat. No. 5,472,693—for example, ATCC No. CRL-11215
[1136] U.S. Pat. No. 6,417,337—for example, ATCC CRL-12208
[1137] U.S. Pat. No. 6,333,405—for example, ATCC CRL-12208

[1138] Immunomedics, Inc: U.S. Pat. Nos. 7,534,431; 7,230,084; 7,300,644; 6,730,300;
[1139] US20110189085
   [1140] an antibody having CDRs of the light chain variable region comprise: CDR1 comprises KASQDVGTSVA (SEQ ID NO: 20); CDR2 comprises WTSTRHT (SEQ ID NO: 21); and CDR3 comprises QQYSLYRS (SEQ ID NO: 22);
   [1141] and the CDRs of the heavy chain variable region of said anti-CEA antibody comprise: CDR1 comprises TYWMS (SEQ ID NO: 23); CDR2 comprises EIHPDSSTINYAPSLKD (SEQ ID NO: 24); and CDR3 comprises LYFGFPWFAY (SEQ ID NO: 25).
[1142] US20100221175; US20090092598; US20070202044; US20110064653; US20090185974; US20080069775.

[1143] (42) MET (met proto-oncogene; hepatocyte growth factor receptor)

[1144] Nucleotide

[1145] Genbank accession no M35073

[1146] Genbank version no. M35073.1 GI:187553

[1147] Genbank record update date: Mar. 6, 2012 11:12 AM

[1148] Polypeptide

[1149] Genbank accession no. AAA59589

[1150] Genbank version no. AAA59589.1 GI:553531

[1151] Genbank record update date: Mar. 6, 2012 11:12 AM

### CROSS REFERENCES

[1152] Dean M., et al Nature 318 (6044), 385-388 (1985)

[1153] Other Information

[1154] Official Symbol: MET

[1155] Other Aliases: AUTS9, HGFR, RCCP2, c-Met

[1156] Other Designations: HGF receptor; HGF/SF receptor; SF receptor; hepatocyte growth factor receptor; met proto-oncogene tyrosine kinase; proto-oncogene c-Met; scatter factor receptor; tyrosine-protein kinase Met

[1157] Antibodies

[1158] Abgenix/Pfizer: US20100040629
[1159] for example, the antibody produced by hybridoma 13.3.2 having American Type Culture Collection (ATCC) accession number PTA-5026; the antibody produced by hybridoma 9.1.2 having ATCC accession number PTA-5027; the antibody produced by hybridoma 8.70.2 having ATCC accession number PTA-5028; or the antibody produced by hybridoma 6.90.3 having ATCC accession number PTA-5029.

[1160] Amgen/Pfizer: US20050054019
[1161] for example, an antibody comprising a heavy chain having the amino acid sequences set forth in SEQ ID NO: 2 where X2 is glutamate and X4 is serine and a light chain having the amino acid sequence set forth in SEQ ID NO: 4 where X8 is alanine, without the signal sequences; an antibody comprising a heavy chain having the amino acid sequences set forth in SEQ ID NO: 6 and a light chain having the amino acid sequence set forth in SEQ ID NO: 8, without the signal sequences; an antibody comprising a heavy chain having the amino acid sequences set forth in SEQ ID NO: 10 and a light chain having the amino acid sequence set forth in SEQ ID NO: 12, without the signal sequences; or an antibody comprising a heavy chain having the amino acid sequences set forth in SEQ ID NO: 14 and a light chain having the amino acid sequence set forth in SEQ ID NO: 16, without the signal sequences.

[1162] Agouron Pharmaceuticals (Now Pfizer): US20060035907

[1163] Eli Lilly: US20100129369

[1164] Genentech: U.S. Pat. No. 5,686,292; US20100028337; US20100016241; US20070129301; US20070098707; US20070092520, US20060270594; US20060134104; US20060035278; US20050233960; US20050037431
[1165] U.S. Pat. No. 5,686,292—for example, ATCC HB-11894 and ATCC HB-11895
[1166] US 20100016241—for example, ATCC HB-11894 (hybridoma 1A3.3.13) or HB-11895 (hybridoma 5D5.11.6)

[1167] National Defense Medical Center, Taiwan: Lu R M., et al Biomaterials. 2011 April; 32(12):3265-74.

[1168] Novartis: US20090175860
[1169] for example, an antibody comprising the sequences of CDR1, CDR2 and CDR3 of heavy chain 4687, wherein the sequences of CDR1, CDR2, and CDR3 of heavy chain 4687 are residues 26-35, 50-65, and 98-102, respectively, of SEQ ID NO: 58; and the sequences of CDR1, CDR2, and CDR3 of light chain 5097, wherein the sequences of CDR1, CDR2, and CDR3 of light chain 5097 are residues 24-39,55-61, and 94-100 of SEQ ID NO: 37.

[1170] Pharmacia Corporation: US20040166544

[1171] Pierre Fabre: US20110239316, US20110097262, US20100115639

[1172] Sumsung: US 20110129481—for example a monoclonal antibody produced from a hybridoma cell having accession number KCLRF-BP-00219 or accession number of KCLRF-BP-00223.

[1173] Samsung: US 20110104176—for example an antibody produced by a hybridoma cell having Accession Number: KCLRF-BP-00220.

[1174] University of Turin Medical School: DN-30 Pacchiana G., et al J Biol Chem. 2010 Nov. 12; 285(46):36149-57

[1175] Van Andel Research Institute: Jiao Y., et al Mol Biotechnol. 2005 September; 31(1):41-54.

[1176] (43) MUC1 (Mucin 1, cell surface associated)

[1177] Nucleotide

[1178] Genbank accession no J05581

[1179] Genbank version no. J05581.1 GI:188869

[1180] Genbank record update date: Jun. 23, 2010 08:48 AM

[1181] Polypeptide

[1182] Genbank accession no. AAA59876

[1183] Genbank version no. AAA59876.1 GI:188870

[1184] Genbank record update date: Jun. 23, 2010 08:48 AM

### CROSS REFERENCES

[1185] Gendler S. J., et al J. Biol. Chem. 265 (25), 15286-15293 (1990)

[1186] Other Information

[1187] Official Symbol: MUC1

[1188] Other Aliases: RP11-263K19.2, CD227, EMA, H23AG, KL-6, MAM6, MUC-1, MUC-1/SEC, MUC-1/X, MUC1/ZD, PEM, PEMT, PUM

[1189] Other Designations: DF3 antigen; H23 antigen; breast carcinoma-associated antigen DF3; carcinoma-associated mucin; episialin; krebs von den Lungen-6; mucin 1, transmembrane; mucin-1; peanut-reactive urinary mucin; polymorphic epithelial mucin; tumor associated epithelial mucin; tumor-associated epithelial membrane antigen; tumor-associated mucin

[1190] Antibodies

[1191] AltaRex—Quest Pharma Tech: U.S. Pat. No. 6,716,966—for example an Alt-1 antibody produced by the hybridoma ATCC No PTA-975.

[1192] AltaRex—Quest Pharma Tech: U.S. Pat. No. 7,147,850

[1193] CRT: 5E5—Sorensen A L., et al Glycobiology vol. 16 no. 2 pp. 96-107, 2006; HMFG2—Burchell J., et al Cancer Res., 47, 5476-5482 (1987)

[1194] Glycotope GT-MAB: GT-MAB 2.5-GEX (Website: http://www.glycotope.com/pipeline/pankomab-gex)

[1195] Immunogen: U.S. Pat. No. 7,202,346
[1196] for example, antibody MJ-170: hybridoma cell line MJ-170 ATCC accession no. PTA-5286Monoclonal antibody MJ-171: hybridoma cell line MJ-171 ATCC accession no. PTA-5287; monoclonal antibody MJ-172: hybridoma cell line MJ-172 ATCC accession no. PTA-5288; or monoclonal antibody MJ-173: hybridoma cell line MJ-173 ATCC accession no. PTA-5302

[1197] Immunomedics: U.S. Pat. No. 6,653,104

[1198] Ramot Tel Aviv Uni: U.S. Pat. No. 7,897,351

[1199] Regents Uni. CA: U.S. Pat. No. 7,183,388; US20040005647; US20030077676.

[1200] Roche GlycArt: U.S. Pat. No. 8,021,856

[1201] Russian National Cancer Research Center: Imuteran-Ivanov P K., et al Biotechnol J. 2007 July; 2(7):863-70

[1202] Technische Univ Braunschweig: (IIB6, HT186-B7, HT186-D11, HT186-G2, HT200-3A-C1, HT220-M-D1, HT220-M-G8)—Thie H., et al PLoS One. 2011 Jan. 14; 6(1):e15921

[1203] (44) CA9 (Carbonic anhydrase IX)

[1204] Nucleotide

[1205] Genbank accession no. X66839

[1206] Genbank version no. X66839.1 GI:1000701

[1207] Genbank record update date: Feb. 2, 2011 10:15 AM

[1208] Polypeptide

[1209] Genbank accession no. CAA47315

[1210] Genbank version no. CAA47315.1 GI:1000702

[1211] Genbank record update date: Feb. 2, 2011 10:15 AM

### CROSS REFERENCES

[1212] Pastorek J., et al Oncogene 9 (10), 2877-2888 (1994)

[1213] Other Information

[1214] Official Symbol: CA9

[1215] Other Aliases: CAIX, MN

[1216] Other Designations: CA-IX; P54/58N; RCC-associated antigen G250; RCC-associated protein G250; carbonate dehydratase IX; carbonic anhydrase 9; carbonic dehydratase; membrane antigen MN; pMW1; renal cell carcinoma-associated antigen G250

[1217] Antibodies

[1218] Abgenix/Amgen: US20040018198

[1219] Affibody: Anti-CAIX Affibody molecules (http://www.affibody.com/en/Product-Portfolio/Pipeline/)

[1220] Bayer: U.S. Pat. No. 7,462,696

[1221] Bayer/Morphosys: 3ee9 mAb—Petrul H M., et al Mol Cancer Ther. 2012 February; 11(2):340-9

[1222] Harvard Medical School: Antibodies G10, G36, G37, G39, G45, G57, G106, G119, G6, G27, G40 and G125. Xu C., et al PLoS One. 2010 Mar. 10; 5(3):e9625

[1223] Institute of Virology, Slovak Academy of Sciences (Bayer)—U.S. Pat. No. 5,955,075
[1224] for example, M75—ATCC Accession No. HB 11128 or MN12—ATCC Accession No. HB 11647

[1225] Institute of Virology, Slovak Academy of Sciences: U.S. Pat. No. 7,816,493
[1226] for example the M75 monoclonal antibody that is secreted from the hybridoma VU-M75, which was deposited at the American Type Culture Collection under ATCC No. HB 11128; or the V/10 monoclonal antibody secreted from the hybridoma V/10-VU, which was deposited at the International Depository Authority of the Belgian Coordinated Collection of Microorganisms (BCCM) at the Laboratorium voor Moleculaire Bioloqie-Plasmidencollectie (LMBP) at the Universeit Gent in Gent, Belgium, under Accession No. LMBP 6009CB.

[1227] Institute of Virology, Slovak Academy of Sciences US20080177046; US20080176310; US20080176258; US20050031623

[1228] Novartis: US20090252738

[1229] Wilex: U.S. Pat. No. 7,691,375—for example the antibody produced by the hybridoma cell line DSM ASC 2526.

[1230] Wilex: US20110123537; Rencarex: Kennett R H., et al Curr Opin Mol Ther. 2003 February; 5(1):70-5

[1231] Xencor: US20090162382

[1232] (45) EGFRvIII (Epidermal growth factor receptor (EGFR), transcript variant 3,

[1233] Nucleotide

[1234] Genbank accession no. NM_201283

[1235] Genbank version no. NM_201283.1 GI:41327733

[1236] Genbank record update date: Sep. 30, 2012 01:47 PM

[1237] Polypeptide

[1238] Genbank accession no. NP_958440

[1239] Genbank version no. NP_958440.1 GI:41327734

[1240] Genbank record update date: Sep. 30, 2012 01:47 PM

### CROSS-REFERENCES

[1241] Batra S K., et al Cell Growth Differ 1995; 6:1251-1259.

[1242] Antibodies:

[1243] U.S. Pat. Nos. 7,628,986 and 7,736,644 (Amgen)
[1244] For example, a heavy chain variable region amino acid sequence selected from the group consisting of SEQ ID NO: 142 and variants & a light chain variable region amino acid sequence selected from the group consisting of: SEQ ID NO: 144 and variants.

[1245] US20100111979 (Amgen)
[1246] For example, an antibody comprising a heavy chain amino acid sequence comprising:
[1247] CDR1 consisting of a sequence selected from the group consisting of the amino acid sequences for the CDR1 region of antibodies 13.1.2 (SEQ ID NO: 138), 131 (SEQ ID NO: 2), 170 (SEQ ID NO: 4), 150 (SEQ ID NO: 5), 095 (SEQ ID NO: 7), 250 (SEQ ID NO: 9), 139 (SEQ ID NO: 10), 211 (SEQ ID NO: 12), 124 (SEQ ID NO: 13), 318 (SEQ ID NO: 15), 342 (SEQ ID NO: 16), and 333 (SEQ ID NO: 17);
[1248] CDR2 consisting of a sequence selected from the group consisting of the amino acid sequences for the CDR2 region of antibodies 13.1.2 (SEQ ID NO: 138), 131 (SEQ ID NO: 2), 170 (SEQ ID NO: 4), 150 (SEQ ID NO: 5), 095 (SEQ ID NO: 7), 250 (SEQ ID NO: 9), 139 (SEQ ID NO: 10), 211 (SEQ ID NO: 12), 124 (SEQ ID NO: 13), 318 (SEQ ID NO: 15), 342 (SEQ ID NO: 16), and 333 (SEQ ID NO: 17); and
[1249] CDR3 consisting of a sequence selected from the group consisting of the amino acid sequences for the CDR3 region of antibodies 13.1.2 (SEQ ID NO: 138), 131 (SEQ ID NO: 2), 170 (SEQ ID NO: 4), 150 (SEQ ID NO: 5), 095 (SEQ ID NO: 7), 250 (SEQ ID NO: 9), 139 (SEQ ID NO: 10), 211 (SEQ ID NO: 12), 124 (SEQ ID NO: 13), 318 (SEQ ID NO: 15), 342 (SEQ ID NO: 16), and 333 (SEQ ID NO: 17).

[1250] US20090240038 (Amgen)
[1251] For example, an antibody having at least one of the heavy or light chain polypeptides comprises an amino acid sequence that is at least 90% identical to the amino acid sequence selected from the group consisting of: SEQ ID NO: 2, SEQ ID NO: 19, SEQ ID NO: 142, SEQ ID NO: 144, and any combination thereof.

[1252] US20090175887 (Amgen)
[1253] For example, an antibody having a heavy chain amino acid sequence selected from the group consisting of the heavy chain amino acid sequence of antibody 13.1.2 (SEQ ID NO: 138), 131 (SEQ ID NO: 2), 170 (SEQ ID NO: 4), 150 (SEQ ID NO: 5), 095 (SEQ ID NO: 7), 250 (SEQ ID NO: 9), 139 (SEQ ID NO: 10), 211 (SEQ ID NO: 12), 124 (SEQ ID NO: 13), 318 (SEQ ID NO: 15), 342 (SEQ ID NO: 16), and 333 (SEQ ID NO: 17).

[1254] US20090156790 (Amgen)
[1255] For example, antibody having heavy chain polypeptide and a light chain polypeptide, wherein at least one of the heavy or light chain polypeptides comprises an amino acid sequence that is at least 90% identical to the amino acid sequence selected from the group consisting of: SEQ ID NO: 2, SEQ ID NO: 19, SEQ ID NO: 142, SEQ ID NO: 144, and any combination thereof.

[1256] US20090155282, US20050059087 and US20050053608 (Amgen)
[1257] For example, an antibody heavy chain amino acid sequence selected from the group consisting of the heavy chain amino acid sequence of antibody 13.1.2 (SEQ ID NO: 138), 131 (SEQ ID NO: 2), 170 (SEQ ID NO: 4), 150 (SEQ ID NO: 5), 095 (SEQ ID NO: 7), 250 (SEQ ID NO: 9), 139 (SEQ ID NO: 10), 211 (SEQ ID NO: 12), 124 (SEQ ID NO: 13), 318 (SEQ ID NO: 15), 342 (SEQ ID NO: 16), and 333 (SEQ ID NO: 17).

[1258] MR1-1 (U.S. Pat. No. 7,129,332; Duke)
[1259] For example, a variant antibody having the sequence of SEQ ID NO.18 with the substitutions S98P-T99Y in the CDR3 VH, and F92W in CDR3 VL.

[1260] L8A4, H10, Y10 (Wikstrand C J., et al Cancer Res. 1995 Jul. 15; 55(14):3140-8; Duke)

[1261] US20090311803 (Harvard University)
[1262] For example, SEQ ID NO:9 for antibody heavy chain variable region, and SEQ ID NO: 3 for light chain variable region amino acid sequences

[1263] US20070274991 (EMD72000, also known as matuzumab; Harvard University)
[1264] For example, SEQ ID NOs: 3 & 9 for light chain and heavy chain respectively

[1265] U.S. Pat. No. 6,129,915 (Schering)
[1266] For example, SEQ. ID NOs: 1, 2, 3, 4, 5 and 6.

[1267] mAb CH12—Wang H., et al FASEB J. 2012 January; 26(1):73-80 (Shanghai Cancer Institute).

[1268] RAbDMvIII—Gupta P., et al BMC Biotechnol. 2010 Oct. 7; 10:72 (Stanford University Medical Center).

[1269] mAb Ua30—Ohman L., et al Tumour Biol. 2002 March-April; 23(2):61-9 (Uppsala University).

[1270] Han D G., et al Nan Fang Yi Ke Da Xue Xue Bao. 2010 January; 30(1):25-9 (Xi'an Jiaotong University).

[1271] (46) CD33 (CD33 molecule)

[1272] Nucleotide

[1273] Genbank accession no. M_23197

[1274] Genbank version no. NM_23197.1 GI:180097

[1275] Genbank record update date: Jun. 23, 2010 08:47 AM

[1276] Polypeptide

[1277] Genbank accession no. AAA51948

[1278] Genbank version no. AAA51948.1 GI:188098

[1279] Genbank record update date: Jun. 23, 2010 08:47 AM

### CROSS-REFERENCES

[1280] Simmons D., et al J. Immunol. 141 (8), 2797-2800 (1988)

[1281] Other Information

[1282] Official Symbol: CD33

[1283] Other Aliases: SIGLEC-3, SIGLEC3, p67

[1284] Other Designations: CD33 antigen (gp67); gp67; myeloid cell surface antigen CD33; sialic acid binding Ig-like lectin 3; sialic acid-binding Ig-like lectin

[1285] Antibodies

[1286] H195 (Lintuzumab)—Raza A., et al Leuk Lymphoma. 2009 August; 50(8):1336-44; U.S. Pat. No. 6,759,045 (Seattle Genetics/Immunomedics)

[1287] mAb OKT9: Sutherland, D. R. et al. Proc Natl Acad Sci USA 78(7): 4515-4519 1981, Schneider, C., et al J Biol Chem 257, 8516-8522 (1982)

[1288] mAb E6: Hoogenboom, H. R., et al J Immunol 144, 3211-3217 (1990)

[1289] U.S. Pat. No. 6,590,088 (Human Genome Sciences)
[1290] For example, SEQ ID NOs: 1 and 2 and ATCC accession no. 97521

[1291] U.S. Pat. No. 7,557,189 (Immunogen)
[1292] For example, an antibody or fragment thereof comprising a heavy chain variable region which comprises three CDRs having the amino acid sequences of SEQ ID NOs:1-3 and a light chain variable region comprising three CDRs having the amino acid sequences of SEQ ID NOs:4-6.

[1293] (47) CD19 (CD19 molecule)

[1294] Nucleotide

[1295] Genbank accession no. NM_001178098

[1296] Genbank version no. NM_001178098.1 GI:296010920

[1297] Genbank record update date: Sep. 10, 2012 12:43 AM

[1298] Polypeptide

[1299] Genbank accession no. NP_001171569

[1300] Genbank version no. NP_001171569.1 GI:296010921

[1301] Genbank record update date: Sep. 10, 2012 12:43 AM

### CROSS-REFERENCES

[1302] Tedder T F., et al J. Immunol. 143 (2): 712-7 (1989)

[1303] Other Information

[1304] Official Symbol: CD19

[1305] Other Aliases: B4, CVID3

[1306] Other Designations: B-lymphocyte antigen CD19; B-lymphocyte surface antigen B4; T-cell surface antigen Leu-12; differentiation antigen CD19

[1307] Antibodies

[1308] Immunogen: HuB4-Al-Katib A M., et al Clin Cancer Res. 2009 Jun. 15; 15(12):4038-45.

[1309] 4G7: Kügler M., et al Protein Eng Des Sel. 2009 March; 22(3):135-47
[1310] For example, sequences in FIG. 3 of of Knappik, A. et al. J Mol Biol 2000 February; 296(1):57-86

[1311] AstraZeneca/MedImmune: MEDI-551—Herbst R., et al J Pharmacol Exp Ther. 2010 October; 335(1):213-22

[1312] Glenmark Pharmaceuticals: GBR-401—Hou S., et al Mol Cancer Ther November 2011 10 (Meeting Abstract Supplement) C164

[1313] U.S. Pat. No. 7,109,304 (Immunomedics)
[1314] For example, an antibody comprising the sequence of hA19Vk (SEQ ID NO:7) and the sequence of hA19VH (SEQ ID NO:10)

[1315] U.S. Pat. No. 7,902,338 (Immunomedics)
[1316] For example, an antibody or antigen-binding fragment thereof that comprises the light chain complementarity determining region CDR sequences CDR1 of SEQ ID NO: 16 (KASQSVDYDGDSYLN); CDR2 of SEQ ID NO: 17 (DASNLVS); and CDR3 of SEQ ID NO: 18 (QQSTEDPWT) and the heavy chain CDR sequences CDR1 of SEQ ID NO: 19 (SYWMN); CDR2 of SEQ ID NO: 20 (QIWPGDGDTNYNGKFKG) and CDR3 of SEQ ID NO: 21 (RETTTVGRYYYAMDY) and also comprises human antibody framework (FR) and constant region sequences with one or more framework region amino acid residues substituted from the corresponding framework region sequences of the parent murine antibody, and wherein said substituted FR residues comprise the substitution of serine for phenylalanine at Kabat residue 91 of the heavy chain variable region.

[1317] Medarex: MDX-1342—Cardarelli P M., et al Cancer Immunol Immunother. 2010 February; 59(2):257-65.

[1318] MorphoSys/Xencor: MOR-208/XmAb-5574—Zalevsky J., et al Blood. 2009 Apr. 16; 113(16):3735-43

[1319] U.S. Pat. No. 7,968,687 (Seattle Genetics)
[1320] An antibody or antigen-binding fragment comprising a heavy chain variable domain comprising the amino acid sequence of SEQ ID NO:9 and a light chain variable domain comprising the amino acid sequence of SEQ ID NO: 24.

[1321] 4G7 chim—Lang P., et al Blood. 2004 May 15; 103(10):3982-5 (University of Tubingen)
[1322] For example, FIG. 6 and SEQ ID No: 80 of US20120082664

[1323] Zhejiang University School of Medicine: 2E8—Zhang J., et al J Drug Target. 2010 November; 18(9):675-8

[1324] (48) IL2RA (Interleukin 2 receptor, alpha); NCBI Reference Sequence: NM_000417.2);

[1325] Nucleotide

[1326] Genbank accession no. NM_000417

[1327] Genbank version no. NM_000417.2 GI:269973860

[1328] Genbank record update date: Sep. 9, 2012 04:59 PM

[1329] Polypeptide

[1330] Genbank accession no. NP_000408

[1331] Genbank version no. NP_000408.1 GI:4557667

[1332] Genbank record update date: Sep. 9, 2012 04:59 PM

### CROSS-REFERENCES

[1333] Kuziel W. A., et al J. Invest. Dermatol. 94 (6 SUPPL), 27S-32S (1990)

[1334] Other Information

[1335] Official Symbol: IL2RA

[1336] Other Aliases: RP11-536K7.1, CD25, IDDM10, IL2R, TCGFR

[1337] Other Designations: FIL-2 receptor subunit alpha; IL-2-RA; IL-2R subunit alpha; IL2-RA; TAC antigen; interleukin-2 receptor subunit alpha; p55

[1338] Antibodies

[1339] U.S. Pat. No. 6,383,487 (Novartis/UCL: Baxilisimab [Simulect])

[1340] U.S. Pat. No. 6,521,230 (Novartis/UCL: Baxilisimab [Simulect])
[1341] For example, an antibody having an antigen binding site comprises at least one domain which comprises CDR1 having the amino acid sequence in SEQ. ID. NO: 7, CDR2 having the amino acid sequence in SEQ. ID. NO: 8, and CDR3 chaving the amino acid sequence in SEQ. ID. NO: 9; or said CDR1, CDR2 and CDR3 taken in sequence as a whole comprise an amino acid sequence which is at least 90% identical to SEQ. ID. NOs: 7, 8 and 9 taken in sequence as a whole.

[1342] Daclizumab—Rech A J., et al Ann N Y Acad Sci. 2009 September; 1174:99-106 (Roche)

[1343] (49) AXL (AXL receptor tyrosine kinase)

[1344] Nucleotide

[1345] Genbank accession no. M76125

[1346] Genbank version no. M76125.1 GI:292869

[1347] Genbank record update date: Jun. 23, 2010 08:53 AM

[1348] Polypeptide

[1349] Genbank accession no. AAA61243

[1350] Genbank version no. AAA61243.1 GI:29870

[1351] Genbank record update date: Jun. 23, 2010 08:53 AM

### CROSS-REFERENCES

[1352] O'Bryan J. P., et al Mol. Cell. Biol. 11 (10), 5016-5031 (1991); Bergsagel P. L., et al J. Immunol. 148 (2), 590-596 (1992)

[1353] Other Information

[1354] Official Symbol: AXL

[1355] Other Aliases: JTK11, UFO

[1356] Other Designations: AXL oncogene; AXL transforming sequence/gene; oncogene AXL; tyrosine-protein kinase receptor UFO

[1357] Antibodies

[1358] YW327.6S2—Ye X., et al Oncogene. 2010 Sep. 23; 29(38):5254-64. (Genentech)

[1359] BergenBio: BGB324 (http://www.bergenbio.com/BGB324)

[1360] (50) CD30—TNFRSF8 (Tumor necrosis factor receptor superfamily, member 8)

[1361] Nucleotide

[1362] Genbank accession no. M83554

[1363] Genbank version no. M83554.1 GI:180095

[1364] Genbank record update date: Jun. 23, 2010 08:53 AM

[1365] Polypeptide

[1366] Genbank accession no. AAA51947

[1367] Genbank version no. AAA51947.1 GI:180096

[1368] Genbank record update date: Jun. 23, 2010 08:53 AM

### CROSS-REFERENCES

[1369] Durkop H., et al Cell 68 (3), 421-427 (1992)

[1370] Other Information

[1371] Official Symbol: TNFRSF8

[1372] Other Aliases: CD30, D1S166E, Ki-1

[1373] Other Designations: CD30L receptor; Ki-1 antigen; cytokine receptor CD30; lymphocyte activation antigen CD30; tumor necrosis factor receptor superfamily member 8

[1374] (51) BCMA (B-cell maturation antigen)—TNFRSF17 (Tumor necrosis factor receptor superfamily, member 17)

[1375] Nucleotide

[1376] Genbank accession no. Z29574

[1377] Genbank version no. Z29574.1 GI:471244

[1378] Genbank record update date: Feb. 2, 2011 10:40 AM

[1379] Polypeptide

[1380] Genbank accession no. CAA82690

[1381] Genbank version no. CAA82690.1 GI:471245

[1382] Genbank record update date: Feb. 2, 2011 10:40 AM

### CROSS-REFERENCES

[1383] Laabi Y., et al Nucleic Acids Res. 22 (7), 1147-1154 (1994)

[1384] Other Information

[1385] Official Symbol: TNFRSF17

[1386] Other Aliases: BCM, BCMA, CD269

[1387] Other Designations: B cell maturation antigen; B-cell maturation factor; B-cell maturation protein; tumor necrosis factor receptor superfamily member 17

[1388] (52) CT Ags—CTA (Cancer Testis Antigens)

### CROSS-REFERENCES

[1389] Fratta E., et al. Mol Oncol. 2011 April; 5(2):164-82; Lim S H., at al Am J Blood Res. 2012; 2(1):29-35.

[1390] (53) CD174 (Lewis Y)—FUT3 (fucosyltransferase 3 (galactoside 3(4)-L-fucosyltransferase, Lewis blood group)

[1391] Nucleotide

[1392] Genbank accession no. NM000149

[1393] Genbank version no. NM000149.3 GI:148277008

[1394] Genbank record update date: Jun. 26, 2012 04:49 PM

[1395] Polypeptide

[1396] Genbank accession no. NP_000140

[1397] Genbank version no. NP_000140.1 GI:4503809

[1398] Genbank record update date: Jun. 26, 2012 04:49 PM

### CROSS-REFERENCES

[1399] Kukowska-Latallo, J. F., et al Genes Dev. 4 (8), 1288-1303 (1990)

[1400] Other Information

[1401] Official Symbol: FUT3

[1402] Other Aliases: CD174, FT3B, FucT-III, LE, Les

[1403] Other Designations: Lewis FT; alpha-(1,3/1,4)-fucosyltransferase; blood group Lewis alpha-4-fucosyltransferase; fucosyltransferase Ill; galactoside 3(4)-L-fucosyltransferase

[1404] (54) CLEC14A (C-type lectin domain family 14, member A; Genbank accession no. NM175060)

[1405] Nucleotide

[1406] Genbank accession no. NM175060

[1407] Genbank version no. NM175060.2 GI:371123930

[1408] Genbank record update date: Apr. 1, 2012 03:34 PM

[1409] Polypeptide

[1410] Genbank accession no. NP_778230

[1411] Genbank version no. NP_778230.1 GI:28269707

[1412] Genbank record update date: Apr. 1, 2012 03:34 PM

[1413] Other Information

[1414] Official Symbol: CLEC14A

[1415] Other Aliases: UNQ236/PRO269, C14orf27, CEG1, EGFR-5

[1416] Other Designations: C-type lectin domain family 14 member A; CIECT and EGF-like domain containing protein; epidermal growth factor receptor 5

[1417] (55) GRP78—HSPA5 (heat shock 70 kDa protein 5 (glucose-regulated protein, 78 kDa)

[1418] Nucleotide

[1419] Genbank accession no. NM005347

[1420] Genbank version no. NM005347.4 GI:305855105

[1421] Genbank record update date: Sep. 30, 2012 01:42 PM

[1422] Polypeptide

[1423] Genbank accession no. NP_005338

[1424] Genbank version no. NP_005338.1 GI:16507237

[1425] Genbank record update date: Sep. 30, 2012 01:42 PM

### CROSS-REFERENCES

[1426] Ting J., et al DNA 7 (4), 275-286 (1988)

[1427] Other Information

[1428] Official Symbol: HSPA5

[1429] Other Aliases: BIP, GRP78, MIF2

[1430] Other Designations: 78 kDa glucose-regulated protein; endoplasmic reticulum lumenal Ca(2+)-binding protein grp78; immunoglobulin heavy chain-binding protein

[1431] (56) CD70 (CD70 molecule) L08096

[1432] Nucleotide

[1433] Genbank accession no. L08096

[1434] Genbank version no. L08096.1 GI:307127

[1435] Genbank record update date: Jun. 23, 2010 08:54 AM

[1436] Polypeptide

[1437] Genbank accession no. AAA36175

[1438] Genbank version no. AAA36175.1 GI:307128

[1439] Genbank record update date: Jun. 23, 2010 08:54 AM

### CROSS-REFERENCES

[1440] Goodwin R. G., et al Cell 73 (3), 447-456 (1993)

[1441] Other Information

[1442] Official Symbol: CD70

[1443] Other Aliases: CD27L, CD27LG, TNFSF7

[1444] Other Designations: CD27 ligand; CD27-L; CD70 antigen; Ki-24 antigen; surface antigen CD70; tumor necrosis factor (ligand) superfamily, member 7; tumor necrosis factor ligand superfamily member 7

[1445] Antibodies

[1446] MDX-1411 against CD70 (Medarex)

[1447] h1F6 (Oflazoglu, E., et al, Clin Cancer Res. 2008 Oct. 1; 14(19):6171-80; Seattle Genetics)
[1448] For example, see US20060083736 SEQ ID NOs: 1, 2, 11 and 12 and FIG. 1.

[1449] (57) Stem Cell specific antigens. For example:
[1450] 5T4 (see entry (63) below)
[1451] CD25 (see entry (48) above)
[1452] CD32
   [1453] Polypeptide
      [1454] Genbank accession no. ABK42161
      [1455] Genbank version no. ABK42161.1 GI:117616286
      [1456] Genbank record update date: Jul. 25, 2007 03:00 PM
[1457] LGR5/GPR49
   [1458] Nucleotide
      [1459] Genbank accession no. NM_003667
      [1460] Genbank version no. NM_003667.2 GI:24475886
      [1461] Genbank record update date: Jul. 22, 2012 03:38 PM
   [1462] Polypeptide
      [1463] Genbank accession no. NP_003658
      [1464] Genbank version no. NP_003658.1 GI:4504379
      [1465] Genbank record update date: Jul. 22, 2012 03:38 PM
[1466] Prominin/CD133
   [1467] Nucleotide
      [1468] Genbank accession no. NM_006017
      [1469] Genbank version no. NM_006017.2 GI:224994187
      [1470] Genbank record update date: Sep. 30, 2012 01:47 PM
   [1471] Polypeptide
      [1472] Genbank accession no. NP_006008
      [1473] Genbank version no. NP_006008.1 GI:5174387
      [1474] Genbank record update date: Sep. 30, 2012 01:47 PM

[1475] (58) ASG-5

### CROSS-REFERENCES

[1476] (Smith L. M., et. al AACR 2010 Annual Meeting (abstract #2590); Gudas J. M., et. al. AACR 2010 Annual Meeting (abstract #4393)

[1477] Antibodies

[1478] Anti-AGS-5 Antibody: M6.131 (Smith, L. M., et. al AACR 2010 Annual Meeting (abstract #2590)

[1479] (59) ENPP3 (Ectonucleotide pyrophosphatase/phosphodiesterase 3)

[1480] Nucleotide

[1481] Genbank accession no. AF005632

[1482] Genbank version no. AF005632.2 GI:4432589

[1483] Genbank record update date: Mar. 10, 2010 09:41 PM

[1484] Polypeptide

[1485] Genbank accession no. AAC51813

[1486] Genbank version no. AAC51813.1 GI:2465540

[1487] Genbank record update date: Mar. 10, 2010 09:41 PM

### CROSS-REFERENCES

[1488] Jin-Hua P., et al Genomics 45 (2), 412-415 (1997)

[1489] Other Information

[1490] Official Symbol: ENPP3

[1491] Other Aliases: RP5-988G15.3, B10, CD203c, NPP3, PD-IBETA, PDNP3

[1492] Other Designations: E-NPP 3; dJ1005H11.3 (phosphodiesterase 1/nucleotide pyrophosphatase 3); dJ914N13.3 (phosphodiesterase 1/nucleotide pyrophosphatase 3); ectonucleotide pyrophosphatase/phosphodiesterase family member 3; gp130RB13-6; phosphodiesterase I beta; phosphodiesterase 1/nucleotide pyrophosphatase 3; phosphodiesterase-1 beta

[1493] (60) PRR4 (Pro/ine rich 4 (Iacrimal))

[1494] Nucleotide

[1495] Genbank accession no. NM_007244

[1496] Genbank version no. NM_007244.2 GI:154448885

[1497] Genbank record update date: Jun. 28, 2012 12:39 PM

[1498] Polypeptide

[1499] Genbank accession no. NP_009175

[1500] Genbank version no. NP_009175.2 GI:154448886

[1501] Genbank record update date: Jun. 28, 2012 12:39 PM

### CROSS-REFERENCES

[1502] Dickinson D. P., et al Invest. Ophthalmol. Vis. Sci. 36 (10), 2020-2031 (1995)

[1503] Other Information

[1504] Official Symbol: PRR4

[1505] Other Aliases: LPRP, PROL4

[1506] Other Designations: lacrimal proline-rich protein; nasopharyngeal carcinoma-associated proline-rich protein 4; proline-rich polypeptide 4; proline-rich protein 4

[1507] (61) GCC—GUCY2C (guanylate cyclase 2C (heat stable enterotoxin receptor)

[1508] Nucleotide

[1509] Genbank accession no. NM_004963

[1510] Genbank version no. NM_004963.3 GI:222080082

[1511] Genbank record update date: Sep. 2, 2012 01:50 PM

[1512] Polypeptide

[1513] Genbank accession no. NP_004954

[1514] Genbank version no. NP_004954.2 GI:222080083

[1515] Genbank record update date: Sep. 2, 2012 01:50 PM

### CROSS-REFERENCES

[1516] De Sauvage F. J., et al J. Biol. Chem. 266 (27), 17912-17918 (1991); Singh S., et al Biochem. Biophys. Res. Commun. 179 (3), 1455-1463 (1991)

[1517] Other Information

[1518] Official Symbol: GUCY2C

[1519] Other Aliases: DIAR6, GUC2C, MUCIL, STAR

[1520] Other Designations: GC-C; STA receptor; guanylyl cyclase C; hSTAR; heat-stable enterotoxin receptor; intestinal guanylate cyclase

[1521] (62) Liv-1—SLC39A6 (Solute carrier family 39 (zinc transporter), member 6)

[1522] Nucleotide

[1523] Genbank accession no. U41060

[1524] Genbank version no. U41060.2 GI:12711792

[1525] Genbank record update date: Nov. 30, 2009 04:35 PM

[1526] Polypeptide

[1527] Genbank accession no. AAA96258

[1528] Genbank version no. AAA96258.2 GI:12711793

[1529] Genbank record update date: Nov. 30, 2009 04:35 PM

### CROSS-REFERENCES

[1530] Taylor K M., et al Biochim Biophys Acta. 2003 Apr. 1; 1611(1-2):16-30

[1531] Other Information

[1532] Official Symbol: SLC39A6

[1533] Other Aliases: LIV-1

[1534] Other Designations: LIV-1 protein, estrogen regulated; ZIP-6; estrogen-regulated protein LIV-1; solute carrier family 39 (metal ion transporter), member 6; solute carrier family 39 member 6; zinc transporter ZIP6; zrt- and Irt-like protein 6

[1535] (63) 5T4, Trophoblast glycoprotein, TPBG-TPBG (trophoblast glycoprotein)

[1536] Nucleotide

[1537] Genbank accession no. AJ012159

[1538] Genbank version no. AJ012159.1 GI:3805946

[1539] Genbank record update date: Feb. 1, 2011 10:27 AM

[1540] Polypeptide

[1541] Genbank accession no. CAA09930

[1542] Genbank version no. CAA09930.1 GI:3805947

[1543] Genbank record update date: Feb. 1, 2011 10:27 AM

### CROSS-REFERENCES

[1544] King K. W., et al Biochim. Biophys. Acta 1445 (3), 257-270 (1999)

[1545] Other Information
[1546] Official Symbol: TPBG
[1547] Other Aliases: 5T4, 5T4AG, M6P1
[1548] Other Designations: 5T4 oncofetal antigen; 5T4 oncofetal trophoblast glycoprotein; 5T4 oncotrophoblast glycoprotein

[1549] (64) CD56—NCMA1 (Neural cell adhesion molecule 1)

[1550] Nucleotide

[1551] Genbank accession no. NM_000615

[1552] Genbank version no. NM_000615.6 GI:336285433

[1553] Genbank record update date: Sep. 23, 2012 02:32 PM

[1554] Polypeptide

[1555] Genbank accession no. NP_000606

[1556] Genbank version no. NP_000606.3 GI:94420689

[1557] Genbank record update date: Sep. 23, 2012 02:32 PM

### CROSS-REFERENCES

[1558] Dickson, G., et al, Cell 50 (7), 1119-1130 (1987)

[1559] Other Information

[1560] Official Symbol: NCAM1

[1561] Other Aliases: CD56, MSK39, NCAM

[1562] Other Designations: antigen recognized by monoclonal antibody 5.1H11; neural cell adhesion molecule, NCAM

[1563] Antibodies

[1564] Immunogen: HuN901 (Smith S V., et al Curr Opin Mol Ther. 2005 August; 7(4):394-401)
[1565] For example, see humanized from murine N901 antibody. See FIGS. 1b and 1e of Roguska, M. A., et al. Proc Natl Acad Sci USA February 1994; 91:969-973.

[1566] (65) CanAg (Tumor associated antigen CA242)

### CROSS-REFERENCES

[1567] Haglund C., et al Br J Cancer 60:845-851, 1989; Baeckstrom D., et al J Biol Chem 266:21537-21547, 1991

[1568] Antibodies

[1569] huC242 (Tolcher A W et al., J Clin Oncol. 2003 Jan. 15; 21(2):211-22; Immunogen)
[1570] For example, see US20080138898A1 SEQ ID NO: 1 and 2

[1571] (66) FOLR1 (Folate Receptor 1)

[1572] Nucleotide

[1573] Genbank accession no. J05013

[1574] Genbank version no. J05013.1 GI:182417

[1575] Genbank record update date: Jun. 23, 2010 08:47 AM

[1576] Polypeptide

[1577] Genbank accession no. AAA35823

[1578] Genbank version no. AAA35823.1 GI:182418

[1579] Genbank record update date: Jun. 23, 2010 08:47 AM

### CROSS-REFERENCES

[1580] Elwood P. C., et al J. Biol. Chem. 264 (25), 14893-14901 (1989)

[1581] Other Information

[1582] Official Symbol: FOLR1

[1583] Other Aliases: FBP, FOLR

[1584] Other Designations: FR-alpha; KB cells FBP; adult folate-binding protein; folate binding protein; folate receptor alpha; folate receptor, adult; ovarian tumor-associated antigen MOv18

[1585] Antibodies

[1586] M9346A—Whiteman K R., et al Cancer Res Apr. 15, 2012; 72(8 Supplement): 4628 (Immunogen)

[1587] (67) GPNMB (Glycoprotein (transmembrane) nmb)

[1588] Nucleotide

[1589] Genbank accession no. X76534

[1590] Genbank version no. X76534.1 GI:666042

[1591] Genbank record update date: Feb. 2, 2011 10:10 AM

[1592] Polypeptide

[1593] Genbank accession no. CAA54044

[1594] Genbank version no. CAA54044.1 GI:666043

[1595] Genbank record update date: Feb. 2, 2011 10:10 AM

### CROSS-REFERENCES

[1596] Weterman M. A., et al Int. J. Cancer 60 (1), 73-81 (1995)

[1597] Other Information

[1598] Official Symbol: GPNMB

[1599] Other Aliases: UNQ1725/PRO9925, HGFIN, NMB

[1600] Other Designations: glycoprotein NMB; glycoprotein nmb-like protein; osteoactivin; transmembrane glycoprotein HGFIN; transmembrane glycoprotein NMB

[1601] Antibodies

[1602] Celldex Therapeutics: CR011 (Tse K F., et al Clin Cancer Res. 2006 Feb. 15; 12(4):1373-82)
[1603] For example, see EP1827492B1 SEQ ID NO: 22, 24, 26, 31, 33 and 35

[1604] (68) TIM-1—HAVCR1 (Hepatitis A virus cellular receptor 1)

[1605] Nucleotide

[1606] Genbank accession no. AF043724

[1607] Genbank version no. AF043724.1 GI:2827453

[1608] Genbank record update date: Mar. 10, 2010 06:24 PM

[1609] Polypeptide

[1610] Genbank accession no. AAC39862

[1611] Genbank version no. AAC39862.1 GI:2827454

[1612] Genbank record update date: Mar. 10, 2010 06:24 PM

### CROSS-REFERENCES

[1613] Feigelstock D., et al J. Virol. 72 (8), 6621-6628 (1998)

[1614] Other Information

[1615] Official Symbol: HAVCR1

[1616] Other Aliases: HAVCR, HAVCR-1, KIM-1, KIM1, TIM, TIM-1, TIM1, TIMD-1, TIMD1

[1617] Other Designations: T cell immunoglobin domain and mucin domain protein 1; T-cell membrane protein 1; kidney injury molecule 1

[1618] (69) RG-1/Prostate tumor target Mindin—Mindin/RG-1

### CROSS-REFERENCES

[1619] Parry R., et al Cancer Res. 2005 Sep. 15; 65(18):8397-405

[1620] (70) B7-H4—VTCN1 (V-set domain containing T cell activation inhibitor 1

[1621] Nucleotide

[1622] Genbank accession no. BX648021

[1623] Genbank version no. BX648021.1 GI:34367180

[1624] Genbank record update date: Feb. 2, 2011 08:40 AM

### CROSS-REFERENCES

[1625] Sica G L., et al Immunity. 2003 June; 18(6):849-61

[1626] Other Information

[1627] Official Symbol: VTCN1

[1628] OtherAliases: RP11-229A19.4, B7-H4, B7H4, B7S1, B7X, B7h.5, PRO1291, VCTN1

[1629] Other Designations: B7 family member, H4; B7 superfamily member 1; T cell costimulatory molecule B7x; T-cell costimulatory molecule B7x; V-set domain-containing T-cell activation inhibitor 1; immune costimulatory protein B7-H4

[1630] (71) PTK7 (PTK7 protein tyrosine kinase 7)

[1631] Nucleotide

[1632] Genbank accession no. AF447176

[1633] Genbank version no. AF447176.1 GI:17432420

[1634] Genbank record update date: Nov. 28, 2008 01:51 PM

[1635] Polypeptide

[1636] Genbank accession no. AAL39062

[1637] Genbank version no. AAL39062.1 GI:17432421

[1638] Genbank record update date: Nov. 28, 2008 01:51 PM

### CROSS-REFERENCES

[1639] Park S. K., et al J. Biochem. 119 (2), 235-239 (1996)

[1640] Other Information

[1641] Official Symbol: PTK7

[1642] Other Aliases: CCK-4, CCK4

[1643] Other Designations: colon carcinoma kinase 4; inactive tyrosine-protein kinase 7; pseudo tyrosine kinase receptor 7; tyrosine-protein kinase-like 7

[1644] (72) CD37 (CD37 molecule)

[1645] Nucleotide

[1646] Genbank accession no. NM_001040031

[1647] Genbank version no. NM_001040031.1 GI:91807109

[1648] Genbank record update date: Jul. 29, 2012 02:08 PM

[1649] Polypeptide

[1650] Genbank accession no. NP_001035120

[1651] Genbank version no. NP_001035120.1 GI:91807110

[1652] Genbank record update date: Jul. 29, 2012 02:08 PM

### CROSS-REFERENCES

[1653] Schwartz-Albiez R., et al J. Immunol. 140 (3), 905-914 (1988)

[1654] Other Information

[1655] Official Symbol: CD37

[1656] Other Aliases: GP52-40, TSPAN26

[1657] Other Designations: CD37 antigen; cell differentiation antigen 37; leukocyte antigen CD37; leukocyte surface antigen CD37; tetraspanin-26; tspan-26

[1658] Antibodies

[1659] Boehringer Ingelheim: mAb 37.1 (Heider K H., et al Blood. 2011 Oct. 13; 118(15):4159-68)

[1660] Trubion: CD37-SMIP (G28-1 scFv-Ig) ((Zhao X., et al Blood. 2007; 110: 2569-2577)
[1661] For example, see US20110171208A1 SEQ ID NO: 253

[1662] Immunogen: K7153A (Deckert J., et al Cancer Res Apr. 15, 2012; 72(8 Supplement): 4625)

[1663] (73) CD138—SDC1 (syndecan 1)

[1664] Nucleotide

[1665] Genbank accession no. AJ551176

[1666] Genbank version no. AJ551176.1 GI:29243141

[1667] Genbank record update date: Feb. 1, 2011 12:09 PM

[1668] Polypeptide

[1669] Genbank accession no. CAD80245

[1670] Genbank version no. CAD80245.1 GI:29243142

[1671] Genbank record update date: Feb. 1, 2011 12:09 PM

### CROSS-REFERENCES

[1672] O'Connell F P., et al Am J Clin Pathol. 2004 February; 121(2):254-63

[1673] Other Information

[1674] Official Symbol: SDC1

[1675] Other Aliases: CD138, SDC, SYND1, syndecan

[1676] Other Designations: CD138 antigen; heparan sulfate proteoglycan fibroblast growth factor receptor; syndecan proteoglycan 1; syndecan-1

[1677] Antibodies

[1678] Biotest: chimerized MAb (nBT062)—(Jagannath S., et al PosterASH#3060, 2010; WIPO Patent Application WO/2010/128087)
[1679] For example, see US20090232810 SEQ ID NO: 1 and 2

[1680] Immunogen: B-B4 (Tassone P., et al Blood 104_3688-3696)
[1681] For example, see US20090175863A1 SEQ ID NO: 1 and 2

[1682] (74) CD74 (CD74 molecule, major histocompatibility complex, class II invariant chain)

[1683] Nucleotide

[1684] Genbank accession no. NM_004355

[1685] Genbank version no. NM_004355.1 GI:343403784

[1686] Genbank record update date: Sep. 23, 2012 02:30 PM

[1687] Polypeptide

[1688] Genbank accession no. NP_004346

[1689] Genbank version no. NP_004346.1 GI:10835071

[1690] Genbank record update date: Sep. 23, 2012 02:30 PM

### CROSS-REFERENCES

[1691] Kudo, J., et al Nucleic Acids Res. 13 (24), 8827-8841 (1985)

[1692] Other Information

[1693] Official Symbol: CD74

[1694] Other Aliases: DHLAG, HLADG, II, Ia-GAMMA

[1695] Other Designations: CD74 antigen (invariant polypeptide of major histocompatibility complex, class II antigen-associated); HLA class II histocompatibility antigen gamma chain; HLA-DR antigens-associated invariant chain; HLA-DR-gamma; Ia-associated invariant chain; MHC HLA-DR gamma chain; gamma chain of class II antigens; p33

[1696] Antibodies

[1697] Immunomedics: hLL1 (Milatuzumab,)—Berkova Z., et al Expert Opin Investig Drugs. 2010 January; 19(1):141-9)
[1698] For example, see US20040115193 SEQ ID NOs: 19, 20, 21, 22, 23 and 24

[1699] Genmab: HuMax-CD74 (see website)

[1700] (75) Claudins—CLs (Claudins)

### CROSS-REFERENCES

[1701] Offner S., et al Cancer Immunol Immunother. 2005 May; 54(5):431-45, Suzuki H., et al Ann N Y Acad Sci. 2012 July; 1258:65-70)

[1702] In humans, 24 members of the family have been described—see literature reference.

[1703] (76) EGFR (Epidermal growth factor receptor)

[1704] Nucleotide

[1705] Genbank accession no. NM_005228

[1706] Genbank version no. NM_005228.3 GI:41927737

[1707] Genbank record update date: Sep. 30, 2012 01:47 PM

[1708] Polypeptide

[1709] Genbank accession no. NP_005219

[1710] Genbank version no. NP_005219.2 GI:29725609

[1711] Genbank record update date: Sep. 30, 2012 01:47 PM

### CROSS-REFERENCES

[1712] Dhomen N S., et al Crit Rev Oncog. 2012; 17(1):31-50

[1713] Other Information

[1714] Official Symbol: EGFR

[1715] Other Aliases: ERBB, ERBB1, HER1, PIG61, mENA

[1716] Other Designations: avian erythroblastic leukemia viral (v-erb-b) oncogene homolog; cell growth inhibiting protein 40; cell proliferation-inducing protein 61; proto-oncogene c-ErbB-1; receptor tyrosine-protein kinase erbB-1

[1717] Antibodies

[1718] BMS: Cetuximab (Erbitux)—Broadbridge V T., et al Expert Rev Anticancer Ther. 2012 May; 12(5):555-65.
[1719] For example, see U.S. Pat. No. 6,217,866—ATTC deposit No. 9764.

[1720] Amgen: Panitumumab (Vectibix)—Argiles G., et al Future Oncol. 2012 April; 8(4):373-89
[1721] For example, see U.S. Pat. No. 6,235,883 SEQ ID NOs: 23-38.

[1722] Genmab: Zalutumumab—Rivera F., et al Expert Opin Biol Ther. 2009 May; 9(5):667-74.

[1723] YM Biosciences: Nimotuzumab—Ramakrishnan M S., et al MAbs. 2009 January-February; 1(1):41-8.
[1724] For example, see U.S. Pat. No. 5,891,996 SEQ ID NOs: 27-34.

[1725] (77) Her3 (ErbB3)—ERBB3 (v-erb-b2 erythroblastic leukemia viral oncogene homolog 3 (avian))

[1726] Nucleotide

[1727] Genbank accession no. M34309

[1728] Genbank version no. M34309.1 GI:183990

[1729] Genbank record update date: Jun. 23, 2010 08:47 PM

[1730] Polypeptide

[1731] Genbank accession no. AAA35979

[1732] Genbank version no. AAA35979.1 GI:306841

[1733] Genbank record update date: Jun. 23, 2010 08:47 PM

### CROSS-REFERENCES

[1734] Plowman, G. D., et al., Proc. Natl. Acad. Sci. U.S.A. 87 (13), 4905-4909 (1990)

[1735] Other Information

[1736] Official Symbol: ERBB3

[1737] Other Aliases: ErbB-3, HER3, LCCS2, MDA-BF-1, c-erbB-3, c-erbB3, erbB3-S, p180-ErbB3, p45-sErbB3, p85-sErbB3

[1738] Other Designations: proto-oncogene-like protein c-ErbB-3; receptor tyrosine-protein kinase erbB-3; tyrosine kinase-type cell surface receptor HER3

[1739] Antibodies

[1740] Merimack Pharma: MM-121 (Schoeberl B., et al Cancer Res. 2010 Mar. 15; 70(6):2485-2494)
[1741] For example, see US2011028129 SEQ ID NOs: 1, 2, 3, 4, 5, 6, 7 and 8.

[1742] (78) RON—MST1R (macrophage stimulating 1 receptor (c-met-related tyrosine kinase))

[1743] Nucleotide

[1744] Genbank accession no. X70040

[1745] Genbank version no. X70040.1 GI:36109

[1746] Genbank record update date: Feb. 2, 2011 10:17 PM

[1747] Polypeptide

[1748] Genbank accession no. CAA49634

[1749] Genbank version no. CAA49634.1 GI:36110

[1750] Genbank record update date: Feb. 2, 2011 10:17 PM

### CROSS-REFERENCES

[1751] Ronsin C., et al Oncogene 8 (5), 1195-1202 (1993)

[1752] Other Information

[1753] Official Symbol: MST1R

[1754] Other Aliases: CD136, CDw136, PTK8, RON

[1755] Other Designations: MSP receptor; MST1R variant RON30; MST1R variant RON62; PTK8 protein tyrosine kinase 8; RON variant E2E3; c-met-related tyrosine kinase; macrophage-stimulating protein receptor; p185-Ron; soluble RON variant 1; soluble RON variant 2; soluble RON variant 3; soluble RONvariant 4

[1756] (79) EPHA2 (EPH receptor A2)

[1757] Nucleotide

[1758] Genbank accession no. BC037166

[1759] Genbank version no. BC037166.2 GI:33879863

[1760] Genbank record update date: Mar. 6, 2012 01:59 PM

[1761] Polypeptide

[1762] Genbank accession no. AAH37166

[1763] Genbank version no. AAH37166.1 GI:22713539

[1764] Genbank record update date: Mar. 6, 2012 01:59 PM

### CROSS-REFERENCES

[1765] Strausberg R. L., et al Proc. Natl. Acad. Sci. U.S.A. 99 (26), 16899-16903 (2002)

[1766] Other Information

[1767] Official Symbol: EPHA2

[1768] Other Aliases: ARCC2, CTPA, CTPP1, ECK

[1769] Other Designations: ephrin type-A receptor 2; epithelial cell receptor protein tyrosine kinase; soluble EPHA2 variant 1; tyrosine-protein kinase receptor ECK

[1770] Antibodies

[1771] Medimmune: 1C1 (Lee J W., et al Clin Cancer Res. 2010 May 1; 16(9):2562-2570)
[1772] For example, see US20090304721A1 FIGS. 7 and 8.

[1773] (80) CD20—MS4A1 (membrane-spanning 4-domains, subfamily A, member 1)

[1774] Nucleotide

[1775] Genbank accession no. M27394

[1776] Genbank version no. M27394.1 GI:179307

[1777] Genbank record update date: Nov. 30, 2009 11:16 AM

[1778] Polypeptide

[1779] Genbank accession no. AAA35581

[1780] Genbank version no. AAA35581.1 GI:179308

[1781] Genbank record update date: Nov. 30, 2009 11:16 AM

### CROSS-REFERENCES

[1782] Tedder T. F., et al Proc. Natl. Acad. Sci. U.S.A. 85 (1), 208-212 (1988)

[1783] Other Information

[1784] Official Symbol: MS4A1

[1785] Other Aliases: B1, Bp35, CD20, CVID5, LEU-16, MS4A2, S7

[1786] Other Designations: B-lymphocyte antigen CD20; B-lymphocyte cell-surface antigen B1; CD20 antigen; CD20 receptor; leukocyte surface antigen Leu-16

[1787] Antibodies

[1788] Genentech/Roche: Rituximab—Abdulla N E., et al BioDrugs. 2012 Apr. 1; 26(2):71-82.
[1789] For example, see U.S. Pat. No. 5,736,137, ATCC deposit No. HB-69119.

[1790] GSK/Genmab: Ofatumumab—Nightingale G., et al Ann Pharmacother. 2011 October; 45(10):1248-55.
[1791] For example, see US20090169550A1 SEQ ID NOs: 2, 4 and 5.

[1792] Immunomedics: Veltuzumab—Goldenberg D M., et al Leuk Lymphoma. 2010 May; 51(5):747-55.
[1793] For example, see U.S. Pat. No. 7,919,273B2 SEQ ID NOs: 1, 2, 3, 4, 5 and 6.

[1794] (81) Tenascin C—TNC (Tenascin C)

[1795] Nucleotide

[1796] Genbank accession no. NM_002160

[1797] Genbank version no. NM_002160.3 GI:340745336

[1798] Genbank record update date: Sep. 23, 2012 02:33 PM

[1799] Polypeptide

[1800] Genbank accession no. NP_002151

[1801] Genbank version no. NP_002151.2 GI:153946395

[1802] Genbank record update date: Sep. 23, 2012 02:33 PM

### CROSS-REFERENCES

[1803] Nies D. E., et al J. Biol. Chem. 266 (5), 2818-2823 (1991); Siri A., et al Nucleic Acids Res. 19 (3), 525-531 (1991)

[1804] Other Information

[1805] Official Symbol: TNC

[1806] Other Aliases: 150-225, GMEM, GP, HXB, JI, TN, TN-C

[1807] Other Designations: GP 150-225; cytotactin; glioma-associated-extracellular matrix antigen; hexabrachion (tenascin); myotendinous antigen; neuronectin; tenascin; tenascin-C isoform 14/AD1/16

[1808] Antibodies

[1809] Philogen: G11 (von Lukowicz T., et al J Nucl Med. 2007 April; 48(4):582-7) and F16 (Pedretti M., et al Lung Cancer. 2009 April; 64(1):28-33)
[1810] For example, see U.S. Pat. No. 7,968,685 SEQ ID NOs: 29, 35, 45 and 47.

[1811] (82) FAP (Fibroblast activation protein, alpha)

[1812] Nucleotide

[1813] Genbank accession no. U09278

[1814] Genbank version no. U09278.1 GI:1888315

[1815] Genbank record update date: Jun. 23, 2010 09:22 AM

[1816] Polypeptide

[1817] Genbank accession no. AAB49652

[1818] Genbank version no. AAB49652.1 GI:1888316

[1819] Genbank record update date: Jun. 23, 2010 09:22 AM

### CROSS-REFERENCES

[1820] Scanlan, M. J., et al Proc. Natl. Acad. Sci. U.S.A. 91 (12), 5657-5661 (1994)

[1821] Other Information

[1822] Official Symbol: FAP

[1823] Other Aliases: DPPIV, FAPA

[1824] Other Designations: 170 kDa melanoma membrane-bound gelatinase; integral membrane serine protease; seprase

[1825] (83) DKK-1 (Dickkopf 1 homolog (Xenopus laevis)

[1826] Nucleotide

[1827] Genbank accession no. NM_012242

[1828] Genbank version no. NM_012242.2 GI:61676924

[1829] Genbank record update date: Sep. 30, 2012 01:48 PM

[1830] Polypeptide

[1831] Genbank accession no. NP_036374

[1832] Genbank version no. NP_036374.1 GI:7110719

[1833] Genbank record update date: Sep. 30, 2012 01:48 PM

### CROSS-REFERENCES

[1834] Fedi P. et al J. Biol. Chem. 274 (27), 19465-19472 (1999)

[1835] Other Information

[1836] Official Symbol: DKK1

[1837] Other Aliases: UNQ492/PRO1008, DKK-1, SK

[1838] Other Designations: dickkopf related protein-1; dickkopf-1 like; dickkopf-like protein 1; dickkopf-related protein 1; hDkk-1

[1839] Antibodies

[1840] Novartis: BHQ880 (Fulciniti M., et al Blood. 2009 Jul. 9; 114(2):371-379)
[1841] For example, see US20120052070A1 SEQ ID NOs: 100 and 108.

[1842] (84) CD52 (CD52 molecule)

[1843] Nucleotide

[1844] Genbank accession no. NM_001803

[1845] Genbank version no. NM_001803.3 GI:1519245483

[1846] Genbank record update date: May 1, 2019 02:13 AM

[1847] Polypeptide

[1848] Genbank accession no. NP_001794

[1849] Genbank version no. NP_001794.2 GI:68342030

[1850] Genbank record update date: May 1, 2019 02:13 AM

### CROSS-REFERENCES

[1851] Xia M. Q., et al Eur. J. Immunol. 21 (7), 1677-1684 (1991)

[1852] Other Information

[1853] Official Symbol: CD52

[1854] Other Aliases: CDW52

[1855] Other Designations: CAMPATH-1 antigen; CD52 antigen (CAMPATH-1 antigen); CDW52 antigen (CAMPATH-1 antigen); cambridge pathology 1 antigen; epididymal secretory protein E5; he5; human epididymis-specific protein 5

[1856] Antibodies

[1857] Alemtuzumab (Campath)—Skoetz N., et al Cochrane Database Syst Rev. 2012 Feb. 15; 2:CD008078.
[1858] For example, see Drugbank Acc. No. DB00087 (BIOD00109, BTDO0109)

[1859] (85) CS1—SLAMF7 (SLAM family member 7)

[1860] Nucleotide

[1861] Genbank accession no. NM_021181

[1862] Genbank version no. NM_021181.3 GI:1993571

[1863] Genbank record update date: Jun. 29, 2012 11:24 AM

[1864] Polypeptide

[1865] Genbank accession no. NP_067004

[1866] Genbank version no. NP_067004.3 GI:19923572

[1867] Genbank record update date: Jun. 29, 2012 11:24 AM

### CROSS-REFERENCES

[1868] Boles K. S., et al Immunogenetics 52 (3-4), 302-307 (2001)

[1869] Other Information

[1870] Official Symbol: SLAMF7

[1871] Other Aliases: UNQ576/PRO1138, 19A, CD319, CRACC, CS1

[1872] Other Designations: 19A24 protein; CD2 subset 1; CD2-like receptor activating cytotoxic cells; CD2-like receptor-activating cytotoxic cells; membrane protein FOAP-12; novel LY9 (lymphocyte antigen 9) like protein; protein 19A

[1873] Antibodies

[1874] BMS: elotuzumab/HuLuc63 (Benson D M., et al J Clin Oncol. 2012 Jun. 1; 30(16):2013-2015)
[1875] For example, see US20110206701 SEQ ID NOs: 9, 10, 11, 12, 13, 14, 15 and 16.

[1876] (86) Endoglin—ENG (Endoglin)

[1877] Nucleotide

[1878] Genbank accession no. AF035753

[1879] Genbank version no. AF035753.1 GI:3452260

[1880] Genbank record update date: Mar. 10, 2010 06:36 PM

[1881] Polypeptide

[1882] Genbank accession no. AAC32802

[1883] Genbank version no. AAC32802.1 GI:3452261

[1884] Genbank record update date: Mar. 10, 2010 06:36 PM

### CROSS-REFERENCES

[1885] Rius C., et al Blood 92 (12), 4677-4690 (1998)

[1886] Official Symbol: ENG

[1887] Other Information

[1888] Other Aliases: RP11-228B15.2, CD105, END, HHT1, ORW, ORW1

[1889] Other Designations: CD105 antigen

[1890] (87) Annexin A1—ANXA1 (Annexin A1)

[1891] Nucleotide

[1892] Genbank accession no. X05908

[1893] Genbank version no. X05908.1 GI:34387

[1894] Genbank record update date: Feb. 2, 2011 10:02 AM

[1895] Polypeptide

[1896] Genbank accession no. CAA29338

[1897] Genbank version no. CAA29338.1 GI:34388

[1898] Genbank record update date: Feb. 2, 2011 10:02 AM

### CROSS-REFERENCES

[1899] Wallner B. P., et al Nature 320 (6057), 77-81 (1986)

[1900] Other Information

[1901] Official Symbol: ANXA1

[1902] Other Aliases: RP11-71A24.1, ANX1, LPC1

[1903] Other Designations: annexin I (lipocortin I); annexin-1; calpactin II; calpactin-2; chromobindin-9; lipocortin I; p35; phospholipase A2 inhibitory protein

[1904] (88) V-CAM (CD106)—VCAM1 (Vascular cell adhesion molecule 1)

[1905] Nucleotide

[1906] Genbank accession no. M60335

[1907] Genbank version no. M60335.1 GI:340193

[1908] Genbank record update date: Jun. 23, 2010 08:56 AM

[1909] Polypeptide

[1910] Genbank accession no. AAA61269

[1911] Genbank version no. AAA61269.1 GI:340194

[1912] Genbank record update date: Jun. 23, 2010 08:56 AM

### CROSS-REFERENCES

[1913] Hession C., et al J. Biol. Chem. 266 (11), 6682-6685 (1991)

[1914] Other Information

[1915] Official Symbol VCAM1

[1916] Other Aliases: CD106, INCAM-100

[1917] Other Designations: CD106 antigen; vascular cell adhesion protein 1

[1918] (89) DLK-1 (Protein delta homolog 1)

[1919] Nucleotide

[1920] Genbank accession no. Z12172

[1921] Genbank version no. Z12172.1

[1922] Genbank record update date: Feb. 2, 2011 10:34 AM

[1923] Polypeptide

[1924] Genbank accession no. CAA78163

[1925] Genbank version no. CAA78163.1

[1926] Genbank record update date: Feb. 2, 2011 10:34 AM

### CROSS-REFERENCES

[1927] Laborda J. et al., J. Biol. Chem. 268:3817-3820(1993)

[1928] Other Information

[1929] Official Symbol DLK-1

[1930] Other Aliases: pG2

[1931] Other Designations: cleaved into Fetal antigen 1, FA1

[1932] (90) KAAG1 (Kidney-associated antigen 1)

[1933] Nucleotide

[1934] Genbank accession no. AF181720

[1935] Genbank version no. AF181720.1

[1936] Genbank record update date: Jul. 26, 2016 05:57 AM

[1937] Polypeptide

[1938] Genbank accession no. AAF23611

[1939] Genbank version no. AAF23611.1

[1940] Genbank record update date: Jul. 26, 2016 05:57 AM

### CROSS-REFERENCES

[1941] Van den Eynde B. J. et al., J. Exp. Med. 190:1793-1800(1999)

[1942] Other Information

[1943] Official Symbol KAAG1

[1944] Other Aliases: RU2 antisense gene protein

[1945] Pathogen Associated Antigens

[1946] The therapies described herein may be used to treat a pathogen-associated disorder. The term “pathogen-associated disorder” pertains disorder caused by, exacerbated-by, or associated with a pathogen. In some embodiments the pathogen-associated disorder is viral, bacterial, fungal, protozoan, parasitical, prion, or protein aggregate; that is, in some embodiments the disorder is associated with a virus, bacterium, fungus, protozoa, parasite, prion protein, or protein aggregate.

[1947] It is contemplated that the therapies of the present disclosure may be used to treat any pathogen-associated disorder that is characterized by a pathogen-associated antigen (PAA). Typically, a PAA is an antigen that is: (1) expressed by, or present on, the pathogen, and (2) not expressed by, or present in, the treated subject. Often a PAA will be an antigen present on the surface of a pathogen.

[1948] In some embodiments the pathogen-associated disorder is a viral disorder. For example, in some embodiments the pathogen-associated disorder is selected from the group consisting of Adenovirus infection, HIV/AIDS, Alphavirus Encephalitis, Arenavirus, Argentine hemorrhagic fever, Arthropod-borne viral encephalitis, Avian Influenza, Bolivian Hemorrhagic Fever, Borna disease, Chickenpox, Chikungunya, Coxsackievirus Infection, Crimean-Congo Hemorrhagic Fever, Cytomegalovirus infection, Dengue fever, Eastern equine encephalitis, Ebola, Echovirus Infection, Epstein-Barr Virus infection, Epstein-Barr Virus Related Tumours, Fifth Disease, Filovirus, Flavivirus, German measles, Hand, foot & mouth disease, Hemorrhagic fever with renal syndrome, Herpes Virus (Herpesviridae) infection, Herpes Simplex Virus Infection, Herpes Zoster Virus, Human Papilloma Virus Associated Epidermal Lesions, Human Papilloma Virus related Cervical Cancer, Mononucleosis, Influenza, Japanese Encephalitis, Kaposi Sarcoma, Korean Hemorrhagic Fever, Kyasanur Forest Disease, Lassa Fever, Lymphocytic choriomeningitis, Marburg Virus Disease, Measles, Molluscum Contagiosum, Mumps, Murray Valley encephalitis, Norwalk Virus related Diarrhea, Omsk hemorrhagic fever, Orthomyxoviruses, Parainfluenza Virus Infection, Paramyxovirus, Parvovirus B19 Infection, Picornavirus, Poxviruses, Rabies, Respiratory syncytial virus infection, Rift Valley Fever, Rotavirus diarrhea, Rubella, Rubeola, Smallpox, St. Louis Encephalitis, Tick-borne Encephalitis, Varicella, Variola, Venezuelan equine encephalitis, Viral hemorrhagic fevers, Western equine encephalitis, West Nile Virus disease Yellow Fever, and Zika

[1949] In some embodiments the PAA is derived from a virus. For example, in some embodiments the PAA is selected from the group consisting of Adeno-associated virus, Aichi virus, Australian bat lyssavirus, BK polyomavirus, Banna virus, Barmah forest virus, Bunyamwera virus, Bunyavirus La Crosse, Bunyavirus snowshoe hare, Cercopithecine herpesvirus, Chandipura virus, Chikungunya virus, Cosavirus A, Cowpox virus, Coxsackievirus, Crimean-Congo hemorrhagic fever virus, Dengue virus, Dhori virus, Dugbe virus, Duvenhage virus, Eastern equine encephalitis virus, Ebolavirus, Echovirus, Encephalomyocarditis virus, Epstein-Barr virus, European bat lyssavirusalitis, GB virus C/Hepatitis G virus Pegivirus, Hantaan virus, Hendra virus, Hepatitis A virus, Hepatitis B virus, Hepatitis C virus, Hepatitis E virus, Hepatitis delta virus, Horsepox virus, Human adenovirus, Human astrovirus, Human coronavirus, Human cytomegalovirus, Human enterovirus 68, 70, Human herpesvirus 1, Human herpesvirus 2, Human herpesvirus 6, Human herpesvirus 7, Human herpesvirus 8, Human immunodeficiency virus, Human papillomavirus 1, Human papillomavirus 2, Human papillomavirus 16,18, Human parainfluenza, Human parvovirus B19, Human respiratory syncytial virus, Human rhinovirus, Human SARS coronavirus, Human spumaretrovirus, Human T-lymphotropic virus, Human torovirus, Influenza A virus, Influenza B virus, Isfahan virus, JC polyomavirus, Japanese encephalitis virus, Junin arenavirus, KI Polyomavirus, Kunjin virus, Lagos bat virus, Lake Victoria Marburgvirus, Langat virus, Lassa virus, Lordsdale virus, Louping ill virus, Lymphocytic choriomeningitis virus, Machupo virus, Mayaro virus, MERS coronavirus, Measles virus, Mengo encephalomyocarditis virus, Merkel cell polyomavirus, Mokola virus, Molluscum contagiosum virus, Monkeypox virus, Mumps virus, Murray valley encephalitis virus, New York virus, Nipah virus, Norwalk virus, O'nyong-nyong virus, Orf virus, Oropouche virus, Pichinde virus, Poliovirus, Punta toro phlebovirus, Puumala virus, Rabies virus, Rift valley fever virus, Rosavirus A, Ross river virus, Rotavirus A, Rotavirus B, Rotavirus C, Rubella virus, Sagiyama virus, Salivirus A, Sandfly fever sicilian virus, Sapporo virus, Semliki forest virus, Seoul virus, Simian foamy virus, Simian virus 5, Sindbis virus, Southampton virus, St. louis encephalitis virus, Tick-borne powassan virus, Torque teno virus, Toscana virus, Uukuniemi virus, Vaccinia virus, Varicella-zoster virus, Variola virus O, Venezuelan equine encephalitis virus, Vesicular stomatitis virus, Western equine encephalitis virus, WU polyomavirus, West Nile virus, Yaba monkey tumor virus, Yaba-like disease virus, Yellow fever virus, and Zika virus.

[1950] In some embodiments the PAA is a viral antigen. For example, in some embodiments the PAA is selected from the group consisting of the antigens having the following unique and stable UniProt entry identifier (see https://www.uniprot.org/help/entrv name): Q69549, Q07852, Q2HR82, Q7T928, P0C742, A0A0P0EFP7, Q80908, Q98839, Q9QJ49, P06427, P68564, Q5GFC6, Q3KSQ7, A0A0P0ERX0, PODJZ1, Q98223, P03193, P04016, P04364, E1U5P1, P14353, A0A0P0ELC3, Q9PX75, Q7T5D1, F5HG51, P17384, Q9QR71, E1U5N7, P29170, A0A0N716U3, P03285, Q98226, P89471, P27225, Q3KSP4, Q5VHB0, P03493, B5SNS7, P20879, Q98200, P52540, Q07857, Q3KSP5, Q5GFC1, P0C723, B5SNR2, P09295, Q2KS45, F5HINO, P21735, P20540, Q76DN6, P21043, B5SNS8, P03286, Q2KS32, Q9WF19, P22422, P35986, Q8BEL8, P33861, B5SNRO, P09731, Q9PWVO, P33828, P24836, Q1HVC3, Q76RB7, P0C733, B5SNS9, F5HDD3, Q2KS76, QOR5R3, P26555, Q8AZJ5, Q76RD5, Q3KSS5, B5SNS4, P09730, Q9PX47, P03086, P50782, P0C726, A9J188, Q1HVD3, B5SNT9, Q7M6G6, 11V199, P21097, P36825, P29996, A9J194, P0C722, B5SNS6, P09721, Q2TQY6, Q89187, P17387, P33803, Q77DT3, Q1HVF8, A9JOQ5, P09720, Q3S8C7, P20988, F5HAY6, P33042, Q6J3L8, Q1HVG1, A9JOW5, P09716, Q6QCM3, P20992, P03105, P03263, Q8QMU7, P68599, A9J1E2, F5H9N9, Q6QCP6, P68614, P36741, Q1HVD1, Q81971, P21041, A9J1J8, P21045, Q77JF8, P33843, Q9JH45, P03177, Q8QMX2, P24937, A9J1G6, P21099, Q6QCK2, P21057, P50798, P20843, 057247, Q81871, A9J1E9, P21100, Q6QCQ0, P33851, P03101, P33041, Q8QN10, P03277, A9JOX4, Q80923, Q6QCV8, P68618, P50822, P89446, C3V9V5, P03276, A9J141, P36723, Q6QCP2, P21065, P50800, Q3KSQ2, Q75Q70, P0C738, A9JOZ6, P26547, Q6QCM2, Q76QZ9, Q07861, P09250, Q91W62, P21036, A9JOS4, P17382, Q6QCWO, P21074, P50788, P21028, B9A5A8, P33859, A9JOV2, P36725, Q6QCL6, P68597, P36736, P18095, B9A5C6, P03284, A9JOW7, P06927, Q98222, P33835, Q80912, Q73367, B9A5D6, 012792, A9JOR2, P03118, Q806A8, P33836, P68320, P04591, Q3KSQ4, Q9DUC4, A9JON9, P04015, Q98261, P33837, P22425, P20874, Q4TUF4, P36716, A9J170, P27221, Q98216, PODJY9, Q98157, P08666, Q5VHB9, P21089, A9J138, P06463, Q98317, POCK28, P35256, P28864, Q5GFC8, Q9PX71, A9JOX6, PODODO, Q805Y6, Q6TUQ9, Q05128, P10189, Q8BEL5, Q9PX43, A9J107, Q80948, Q7T5D7, P33840, F5HC97, P52450, Q5VHC3, P21000, A9J1M0, Q45UF8, Q98315, P33842, Q9QJ40, P20978, Q5VHC6, P21001, A9J1K3, Q73369, Q98319, POCK20, Q9ENL1, F5HIG1, Q76RC6, Q9QJ58, A9J1R0, 070901, Q98275, P33847, Q89865, P10192, B9A5C1, P21115, A9J1T7, P60170, Q98311, P60672, Q77375, P89431, B9A5E0, P03224, A9J152, Q01351, Q76SZ3, P68616, Q9WT46, P52375, B9A5D2, P68345, A9J1U3, P52516, Q98210, P33854, P60505, P52451, B9A5A7, P03199, A9J101, P24435, Q98256, Q89183, Q9WT54, P04850, B9A5B0, Q3KST3, A9J1L5, Q9QJ28, Q98188, P21060, F5HCP3, Q6WB98, B9A5D9, P03197, A9JOU9, Q01352, Q76SZ4, P33832, P16773, 036634, B9A5D8, Q3KST5, A9J127, P52444, Q806B9, P21061, Q6SW10, P26629, Q3KSQ9, P30117, A9J1J4, P52445, Q7T5E1, P33855, F5HGQ8, Q77372, B9A5C5, Q3KSU2, A9J1K6, P20511, Q98294, P21069, F5H9Z4, P10211, B9A5B7, Q1HVH3, A9J136, P20523, Q805Y9, P21070, F5HAM0, P21022, Q5GFC2, P0C737, A9JOW9, P21085, Q806B8, P21066, P16741, P32991, E1U5P5, P03210, A9JOR8, P21119, Q89900, P21063, A8W995, P03347, Q5GFA9, P03206, A9J1K5, P21121, 11V175, P20990, P68620, P04592, E1U5P9, P21044, A9J114, P20542, 11V198, P33838, Q9QJ45, Q8JSZ3, Q8BEL7, P21104, A9J1E5, P20559, Q2KS4I, POCK27, Q69569, PODOEO, B9A5A6, P33797, A9JOP1, P68491, Q6JGG8, P20991, Q6SW14, P68762, B9A5B8, P12537, A9JOV4, P20551, Q2KS68, Q89489, P89436, P11235, K7ZLNO, P03274, A9J161, P20510, Q82009, P20535, P52463, P21030, Q3KSRO, P0C717, A9J1L4, P68485, Q4JEP8, P33816, Q9QJ33, P36320, Q6TV17, P30119, A9JOR6, P20512, Q82005, P33848, P52464, P0C763, B9A5B2, P0C734, A9J112, P68487, Q6QC16, P33850, F5HF47, Q69091, F8S4P1, P34016, A9JOT9, P20513, Q77JF7, P33852, P16821, P04488, C9EA16, 057211, A9J103, Q9DUC3, Q6QCL5, P33853, F5H8Q3, P89475, Q5VHA2, P33065, A9J148, Q9WGZ1, Q6QCL3, P33876, P16756, P68324, E1U5N3, P36713, A9J110, P68475, Q6QCT9, P21071, P16766, F5HAK9, Q6QCL1, 070739, A9J1V5, P68477, Q6QCQ2, P21067, Q6SW63, Q9QOU6, Q67721, Q9QU30, A9JOXO, P20547, Q6QCJ5, P33856, F5HAE6, P16827, Q6QCT4, P03207, A9J123, P20548, Q6X674, P21068, P52548, P52376, Q6QCQ1, Q3KSS8, A9JOU1, P20553, Q6QCP5, Q89186, Q06092, Q2HR92, Q6QCJ9, P21106, A9JOU3, P68626, Q6QCM5, P68595, P16798, P09300, Q3KSU9, P21090, B8XTP8, P20526, Q775H9, P33794, P08560, P90489, Q3KSVO, P21039, A9J1G1, P21120, Q6QCN1, P68594, F5HFB4, P03179, Q3KSU6, P34013, A9J1J5, P20527, Q6QCU3, P20534, Q6SW55, Q3KSV4, Q9QCF1, P34014, A9J1L3, P20530, Q6QCN2, P33839, P16813, Q1HVJO, Q98198, P33860, A9J114, P21123, Q6QCN5, P20994, P09288, Q6WB99, Q98255, P21042, A9J134, P20552, Q98213, Q07032, P16731, PODJX6, Q98274, Q9WSV7, A9JOQ7, F5HET4, Q98215, P21114, Q9WT06, Q3KSR5, Q7T5C1, P04133, A9J129, Q69548, Q98280, P68632, P52472, F5HF49, Q805Z9, Q9PZTO, A9JOW3, Q9QJ50, Q98197, P21096, P16762, P24935, Q98236, P12538, A9JOT7, F5H8R0, Q98259, P33849, P16787, P52448, Q98282, P21040, A9JOX5, Q69550, Q98248, P20993, Q6SWA4, Q2HR95, 040975, P20508, A9J1N4, P90463, Q98273, P68592, Q6SW89, Q1HVE7, Q98244, P03279, A9J1M1, Q9QJ46, Q98193, P33827, P16786, P16789, Q806C1, P36712, A9J1NO, Q69558, Q98283, P21058, Q6SW82, P04294, Q98278, P35988, A9JOX2, Q9QJ43, Q98307, P21064, P16775, P59632, Q7T5D6, P03281, A9J1R4, Q9QJ41, Q98196, P33844, P17146, P16728, Q806C0, P24447, A9J1F0, Q69559, Q7T5C5, P20985, Q6SWC3, F5HGN8, Q98271, P52346, A9J117, P52529, Q7T5C4, P33833, P16833, P09291, Q98302, P09253, A9J1T0, P03293, Q7T5E9, P20987, P16721, F5HE74, Q8V727, P03195, A9J1V3, Q7TLC7, Q7T5D4, PODJZ0, P10186, Q69551, Q7T400, Q3KST7, A9J1J3, PODKB2, Q805Z8, P33841, Q20MD0, Q89882, Q98175, P89469, A9JOU5, Q9ENK7, Q7T5E8, P20989, Q20MD6, F5HHS3, Q806A4, Q2HRC6, A9J1R6, A5HBD5, Q89478, Q98300, Q9WF16, P16845, Q806C2, P21050, A9JOY6, P35258, Q9YIE0, P20995, Q9WF14, P16849, Q98272, P68449, A9J1L0, Q9ENL4, Q6RK96, Q89485, Q9WF20, P17148, Q98301, P33822, A9J1F7, Q91N14, Q9PWU3, P20996, Q98172, P16822, Q98237, P21081, A9J0Q2, Q89843, Q5EY84, P20983, Q98281, P52545, Q98310, P21080, A9J132, P20882, Q4JEP6, P33858, Q98203, Q2HRB2, Q98227, P33862, A9J1E3, POC1C6, Q9PX68, P33857, Q98293, Q69554, Q7T5E6, P14351, A9J172, P03290, Q2KS40, P09279, Q98322, Q9WT45, Q7T401, P14075, A9J150, P03294, Q2KS44, P14348, Q98297, P24437, Q98284, Q0R5Q9, A9J1N6, P27557, Q6RK77, Q76QZ8, Q98312, P16801, Q806C4, P03383, A9J1C9, P03107, 11V197, P20531, Q87644, Q6SW48, Q805Z1, P04581, A9J1M3, Q05138, Q5EY48, P20842, Q98204, F5HFG3, Q89811, Q77377, A9J1I0, P03099, Q2KS77, Q5MQDO, Q98219, P16814, Q1WDN6, P20872, A9J1F2, P36753, Q2KS62, P03083, Q98328, P16797, Q806B4, P33064, A9J116, P36755, Q6RK85, A5HBD7, Q98206, F5HFJ8, Q98289, P03255, A9J112, P06794, Q9PX39, P20880, Q98205, P24439, Q85288, P03259, A9J1P3, P06418, 11V161, Q73370, Q6TVS6, P16781, Q7T5D2, P03243, A9J157, P32990, Q77SK4, P04611, Q6TVL3, P16847, Q806A5, P04491, A9JOZ4, P36735, Q9WF18, P04608, Q6TVMO, POCK56, Q98270, P36705, A9JOX9, P33814, Q7ZBU5, P14079, Q6TVT7, P16719, Q98309, P0DJX0, A9J1D8, P25486, Q76630, F5HF23, Q6TVJ4, Q6SW79, Q7T5C2, Q3KSU3, A9J1D1, Q02515, 11V8P0, P04487, Q6TVJ8, P28282, Q98212, P03211, A9JOP3, P27558, Q6TUQ1, F7V996, Q6TVT5, P16816, Q98316, Q3KSS4, A9JOS7, Q80918, Q6TUQ0, P68608, Q6TVK9, P16746, Q98269, Q69022, Q80945, P06918, Q6TUP1, P33805, Q6TVL6, Q6SWC6, A7KCN3, Q1HVG4, Q89184, Q80946, Q6TUS9, P15423, Q6QCV5, P16776, Q98286, P68634, Q07045, Q80953, Q6TUY4, P24940, Q6TVN7, P16737, Q8V721, P06498, 013311, Q5MQC7, DOZ5U4, P21077, Q6TVK0, P16828, Q805Y1, P36707, Q20MC9, Q6Q1R9, DOZ5T3, P21062, Q6TVS8, P16829, Q7T5C8, P68978, Q83977, P35260, DOZ5S5, P24933, Q6TVK5, P16738, Q9YIW0, P36709, Q20MD1, Q91N13, DOZ5T4, P68340, Q6TVJ0, P16770, Q98202, P21047, Q20MC7, P69481, DOZ5U8, PODOE5, Q6TVR8, P28275, Q98321, P33819, Q83976, P52439, Q9PWU2, P36714, Q6TVU9, P32988, Q805Z3, P06497, Q9WF13, P52440, DOZ5U9, P22112, Q6TVU1, P04413, Q7T5C6, P03242, G8H3V2, Q9YJJ8, DOZ5U3, P21132, Q6TVK6, P09722, Q806A6, P03191, Q80924, P05956, DOZSU1, P20841, Q6TVI8, Q6SW00, Q98279, POC6Z1, D6NGF9, P69726, DOZ5R9, P33831, Q6TVM5, F5HDK1, Q805Y0, F5HGH5, 11V8N7, P05954, Q80929, Q6Q1S2, Q6TVK4, P69332, Q98186, Q82040, 11V8N8. In each of the above Uniprot records, the sequence of the protein antigen relevant for the present disclosure is version 1, as designated in the Uniprot record by the record number followed by “−1”. This sequence designation is unique and unchaging. For example, in the Uniprot record 11V8N8 the the sequence of the protein antigen relevant for the present disclosure is designated in the Uniprot record as “I1V8N8-1”.

[1951] In some embodiments the pathogen-associated disorder is a bacterial disorder. For example, in some embodiments the pathogen-associated disorder is selected from the group consisting of Actinomycosis, Acute prostatitis, Anaerobic infection, Bacillary peliosis, Bacteremia, Bacterial pneumonia, Bacteroides ureolyticus, Baggio-Yoshinari syndrome, Barcoo fever, Bartonellosis, Biliary fever, Botryomycosis, Bovine campylobacteriosis, Brazilian purpuric fever, Brazilian Purpuric Fever, Brodie abscess, Burkholderia cepacia complex, Buruli ulcer, Campylobacteriosis, Capnocytophaga canimorsus, Cariogram, Carrion's disease, Chlamydia suis, Cholera, bacterial prostatitis, osteomyelitis, endodontic lesions, bovine pleuropneumonia, dermatitis, Diphtheria, Diphtheritic stomatitis, Epidural abscess, Epiglottitis, Erysipelas, Legionaires' disease, Far East scarlet-like fever, Fitz-Hugh-Curtis syndrome, Foot rot, Gardnerella vaginalis, Garre's sclerosing osteomyelitis, Granuloma inguinale, Haemophilus meningitis, monocytotropic ehrlichiosis, Lemierre's syndrome, Leprosy, Listeriosis, Lyme disease, Meningococcal disease, Mycobacterium avium-intracellulare infection, Necrotizing fasciitis, Nocardiosis, Noma, Omphalitis, Orbital cellulitis, Periodontal abscess, Periorbital cellulitis, Peritonsillar abscess, Pott disease, Proctitis, Pseudomonas infection, Psittacosis, Pyaemia, Pyomyositis, Q fever, Retropharyngeal abscess, Salmonellosis, Serratia infection, Shigellosis, Southern tick-associated rash illness, Staphylococcal scalded skin syndrome, brucellosis, Syphilis, Tetanus, Toxic shock syndrome, Trench fever, Tropical ulcer, Tubo-ovarian abscess, Ureaplasma urealyticum infection, Tuberculosis, Vertebral osteomyelitis, Waterhouse-Friderichsen syndrome, Whooping cough, Xanthogranulomatous osteomyelitis, and Yersiniosis.

[1952] In some embodiments the PAA is derived from a bacterium. For example, in some embodiments the PAA is iderived from a bacterium selected from the group consisting of Acetobacter aurantius, Acinetobacter baumannii, Actinomyces israelii, Agrobacterium radiobacter, Agrobacterium tumefaciens, Anaplasma sp. inc. Anaplasma phagocytophilum, Azorhizobium caulinodans, Azotobacter vinelandii, Bacillus, Bacillus anthracis, Bacillus brevis, Bacillus cereus, Bacillus fusiformis, Bacillus licheniformis, Bacillus megaterium, Bacillus mycoides, Bacillus stearothermophilus, Bacillus subtilis, Bacillus Thuringiensis, Bacteroides sp. inc Bacteroides fragilis, Bacteroides gingivalis, Bacteroides melaninogenicus, Prevotella melaninogenica, Bartonella sp. inc. Bartonella henselae, Bartonella Quintana, Bordetella sp. inc. Bordetella bronchiseptica, Bordetella pertussis, Borrelia burgdorferi, Brucella sp. inc. Brucella abortus, Brucella melitensis, Brucella suis, Burkholderia sp. inc. Burkholderia mallei, Burkholderia pseudomallei, Burkholderia cepacia, Calymmatobacterium granulomatis, Campylobacter sp. inc. Campylobacter coli, Campylobacter fetus, Campylobacter jejuni, Campylobacter pylori, Chlamydia sp. inc. Chlamydia trachomatis, Chlamydophila sp. inc. Chlamydophila pneumoniae, Chlamydophila psittaci, Clostridium sp. inc. Clostridium botulinum, Clostridium difficile, Clostridium perfringens, Clostridium tetani, Corynebacterium sp. inc. Corynebacterium diphtheriae, Corynebacterium fusiforme, Coxiella burnetii, Ehrlichia chaffeensis, Enterobacter cloacae, Enterococcus sp. inc. Enterococcus avium, Enterococcus durans, Enterococcus faecalis, Enterococcus faecium, Enterococcus galllinarum, Enterococcus maloratus, Escherichia coli, Francisella tularensis, Fusobacterium nucleatum, Gardnerella vaginalis, Haemophilus sp. inc. Haemophilus ducreyi, Haemophilus influenzae, Haemophilus parainfluenzae, Haemophilus pertussis, Haemophilus vaginalis, Helicobacter pylori, Klebsiella pneumoniae, Lactobacillus sp. inc. Lactobacillus acidophilus, Lactobacillus bulgaricus, Lactobacillus casei, Lactococcus lactis, Legionella pneumophila, Listeria monocytogenes, Methanobacterium extroquens, Microbacterium multiforme, Micrococcus luteus, Moraxella catarrhalis, Mycobacterium sp. inc. Mycobacterium avium, Mycobacterium bovis, Mycobacterium diphtheria, Mycobacterium intracellulare, Mycobacterium leprae, Mycobacterium lepraemurium, Mycobacterium phlei, Mycobacterium smegmatis, Mycobacterium tuberculosis, Mycoplasma sp. inc. Mycoplasma fermentans, Mycoplasma genitalium, Mycoplasma hominis, Mycoplasma penetrans, Mycoplasma pneumoniae, Neisseria sp. inc. Neisseria gonorrhoeae, Neisseria meningitides, Pasteurella sp. inc. Pasteurella multocida, Pasteurella tularensis, Peptostreptococcus, Porphyromonas gingivalis, Prevotella melaninogenica, Pseudomonas aeruginosa, Rhizobium radiobacter, Rickettsia sp. inc. Rickettsia prowazekii, Rickettsia psittaci, Rickettsia quintana, Rickettsia rickettsia, Rickettsia trachomae, Rochalimaea sp. inc. Rochalimaea henselae, Rochalimaea quintana, Rothia dentocariosa, Salmonella sp. inc. Salmonella enteritidis, Salmonella typhi, Salmonella typhimurium, Serratia marcescens, Shigella dysenteriae, Spirillum volutans, Staphylococcus sp. inc. Staphylococcus aureus, Staphylococcus epidermidis, Stenotrophomonas maltophilia, Streptococcus sp. inc. Streptococcus agalactiae, Streptococcus avium, Streptococcus bovis, Streptococcus cricetus, Streptococcus faceium, Streptococcus faecalis, Streptococcus ferus, Streptococcus gallinarum, Streptococcus lactis, Streptococcus mitior, Streptococcus mitis, Streptococcus mutans, Streptococcus oralis, Streptococcus pneumoniae, Streptococcus pyogenes, Streptococcus rattus, Streptococcus salivarius, Streptococcus sanguis, Streptococcus sobrinus, Treponema sp. inc. Treponema pallidum, Treponema denticola, Vibrio sp. inc. Vibrio cholerae, Vibrio comma, Vibrio parahaemolyticus, Vibrio vulnificus, Wolbachia, Yersinia sp. inc. Yersinia enterocolitica, Yersinia pestis, and Yersinia pseudotuberculosis.

[1953] In some embodiments the PAA is a bacterial antigen. For example, in some embodiments the PAA is selected from the group consisting of the antigens having the following unique and stable UniProt entry identifier (see https://www.uniprot.org/help/entrv name): P13423, Q9S5G6, Q7CCJ3, Q9L6R5, Q00473, C6DHE3, P9WIQ6, P37669, P42382, P31494, Q9AIX9, P9WL65, B1JS09, P9WLS9, Q83F12, Q2FDM1, P39180, P58237, P21979, Q9L6Q8, Q9HUF7, POAG01, L8FKX3, B1LLW8, P26950, P45680, Q9AJ64, 053379, Q56978, QOSYY3, P62605, Q2FUX3, P9WGU1, P72139, Q07297, Q57HS2, P26403, B4TNU6, P0A569, Q1R4E1, QOPAS1, C3PCX2, Q9AJ75, POAB35, P9WG11, P27833, P11089, Q6GDG4, P9WQP1, P9WJA3, Q7A3D7, B4SZ40, P26406, A8G841, PODOA7, B5QVI4, P18194, Q73DZ5, BORVK4, P0AB37, P9WGU0, B7MH57, Q06968, Q6G636, P9WIR7, Q9ZGM0, Q6GDN3, POAAA8, P37746, QOSYY4, P9WJD7, B5XYX5, P0C109, Q63GDO, 067998, P33792, QOP9X8, Q1CNJ1, Q06970, Q31SH3, P9WMK1, P60665, Q6G6A8, B7NTE8, Q07024, P9WLS5, P9WNK4, P27828, POA3P1, Q7A6D2, Q04974, Q04976, A1VZQ4, A4TRB6, Q06982, Q3YTH5, P9WPE7, Q4A122, Q79ZY3, A8A6P9, Q48476, P19478, 032629, B5BIU1, POA3P2, A8ZOC1, 066256, 031822, Q6F7F9, B5BIU3, Q06983, P18012, P9WK61, Q05852, Q5HDQ9, A9R8J0, Q06951, P18164, P44935, Q7MYM6, E4QEX4, B9DQ98, P16665, Q8FVC3, Q57254, Q66G07, P02975, Q6G6A5, P9WQN9, Q5HD54, Q8NV83, B1LLW7, Q50864, Q92BW7, Q83AF7, B4F1W8, POCOJ7, Q5HQE7, P37917, Q83BT6, P9WMK0, POAC79, E3PPC4, P18014, J714B7, Q6GDU6, Q53587, Q04866, P52642, Q48754, P14727, B5QV16, Q9LBG3, P31495, Q83F59, P9WN15, P50927, POAC78, POCK93, B2TT54, P9WQP3, Q5HLD1, P31784, Q6CZF1, Q8Z514, P9WM17, 030620, B7UNB2, P11657, PODJH1, P07643, Q6U113, P50928, A7FD62, P11312, Q03947, POC2T2, Q8CR67, Q5HCY4, 033789, P37748, Q83AX3, P68641, A1AHW3, Q9KKA3, Q6G2B2, P29721, Q9RNC7, Q84168, B7M5E2, P04740, Q54150, P9WQB1, P77682, P16952, POAG02, P0A236, Q83A32, P21762, Q1CNJ0, Q2YLR6, Q9S3N1, P19649, F7YJG6, Q1RGK9, C4ZZ62, P02973, P9W155, P9WPE5, P43413, Q7BQ98, A9MXG6, Q56083, Q2YIU6, P26276, Q8FBP8, P05430, Q811A1, P29720, Q9R2W4, P29697, B1LLW6, P33781, A7X6T9, P9WNK5, Q9S5G3, P46861, B5BIU2, Q00329, Q579D9, POCOB3, P27835, POCL66, P54166, P29724, Q04972, POA3N4, A8A6Q0, Q06971, Q7A377, P9WK45, Q06963, Q83D73, Q8Z396, POA1P4, Q9ZDHO, P27951, 033953, 031178, A6U0C2, P38369, Q45207, Q9F9F2, Q1CNI9, Q06974, Q8VSC3, Q06277, Q7DBF3, Q9HTB6, A7FD61, P27243, P43112, P45430, B614D1, Q8KQL6, Q2F160, P37761, G3XD61, Q52764, B11WA5, P06179, P18011, B5XK69, Q8DR60, P55293, P43109, P37742, Q45214, Q661N6, B7LU62, P9WIG7, A5IRJ3, P55294, P37749, Q9KH57, Q9L6R7, POA2K7, Q03946, P9WMU1, Q5LGZ8, P37745, P43110, P37755, P0A687, Q9X6B1, P95730, P96989, Q8CPR3, P26391, P37750, Q04102, B614D2, P0AEP6, Q2FDT8, Q53020, Q9S5G4, P37763, Q9RND2, P26405, P9WIG4, Q63K34, P37792, Q83EK8, AOR9F0, BORVLO, P71241, POA5B8, B5FN86, P25733, Q2FV52, P29723, P9WG64, Q46769, P21876, P26404, P9WIG5, P26949, B5EZ53, PODJ01, B7H9Q4, POC7J0, P26388, P50929, Q8ZAE1, Q3KMQ9, Q2YWD9, P9WJD9, P9WGM7, P61888, P29228, Q48478, P9WMU0, Q02192, POAG00, P18195, Q651A4, P37780, Q9XC60, P50930, B7LU61, POCOZ7, Q5HCY1, P02974, Q9L5X1, P31782, Q45215, Q05347, Q03084, Q63K37, B5FN87, PODH58, Q8NXC3, Q51832, Q8KIU8, P16624, A6TGI3, Q5ZXP3, Q6GDN1, Q49575, Q9L5X0, P9WGE7, Q45212, P37781, G3XD23, Q9X6B2, B5QV15, P15921, Q81YW9, P26392, PODMP6, P50931, COQ3A6, P16625, P60157, Q8FDQ2, PODF61, P23504, P11000, P0A235, B2TU00, P26948, C3LHC1, POCL67, C1EWE6, P37759, P67066, POA3N5, Q8Z395, P48219, Q5HL49, Q53047, POA4G3, Q53781, POA5N3, P37784, Q8Z389, Q63K35, B7JNE4, B7J1T8, A8FED1, Q6E7F4, Q9L6R4, Q7PA29, B5L3X1, P48214, Q8CMZ9, P33406, P31304, Q2G2J2, P37751, P26395, Q8ZAE4, QOSNDO, G3XD94, Q9HUG6, P22940, Q9S642, P67067, P22882, B5L3F2, G4WJD4, Q4AOG5, POCOJ8, P42363, Q6G723, P36667, Q05342, Q1CBP2, Q45010, P31496, Q83BSO, P37916, P37777, Q3YVHO, 052972, A8ACU6, P24301, A71Y64, PODJ00, Q9L5W9, Q2G2U9, Q4KXC9, P26471, A8ACU5, Q9ZLT1, P37918, P80369, 032270, P26394, A9R819, AOQU51, B7MH58, P12834, Q2YZ63, P26493, PODF60, A6QES8, P43111, Q48479, A7ZTZ6, P55980, Q02938, P20148, P17915, Q2SYI1, Q8XAS7, P9WQP0, B7L952, P69050, POA3L9, Q81QT1, P9WIN9, P13367, Q8KQC3, Q50863, B1JPZ9, A1VYV6, Q04973, P85410, Q2MGH6, Q7VJ79, P37457, 006052, B1IWA6, P24428, B1MHR6, Q9ABRO, Q07408, P80582, P29230, Q56902, B7MR14, P26926, Q04975, P13415, Q8A2Z5, P57041, B7L953, Q05861, P35272, P33548, J9W7B2, Q8P120, POA5Q3, P31781, Q49536, Q56903, A8ACU7, P94851, Q4L524, 006653, B1V8K7, E6MXWO, Q8XAQ3, P46729, B7NF99, POA2U4, AOAOH3MGR5, Q9AHT6, P9WNF5, P37779, Q49537, Q2FE11, B7M5E0, Q83ES6, B7HU46, P9W141, 030405, Q52657, Q8FBP9, P46730, Q1R4E2, Q326Z6, AOAOH3M3S8, Q99ZN9, P42364, P61887, Q49538, Q2FVC1, A7MQI6, P9WNB1, A9VSQ8, P9WHZ3, Q9A9H3, Q08137, P56258, P46731, B2VG51, Q03945, P9WK44, PODC90, Q9KIJ3, P55254, 085341, Q9ZB73, B7UNB3, P9WNQ7, Q2YWW6, Q6GDU9, Q826C5, P9WP33, B1XAG6, P46732, Q7MYM5, P65645, 007750, Q5XC63, Q9CFZ5, P26393, PODMP7, Q79FB3, A8A6P8, P9WNR7, Q6G167, Q6G613, Q06952, P9WQB0, A9R8J1, P12809, A9MJ16, Q9LAB5, Q49803, Q49588, POA4G4, BORVK9, P26389, Q83AH2, B5YY43, P9WNK3, Q49WE6, Q8NUV4, Q49VP4, Q00488, B5EZ52, P58248, Q57HS3, Q8X8T3, A5U990, P9WGT7, P31305, P44914, Q5JBG6, Q9KW51, B11WA7, PODOA6, B71W03, P18159, Q2FE05, P13719, A9MJ17, A1KJU9, B4TB26, Q51473, P9WK60, P46024, POA4V7, P37760, Q58YV9, Q99RE2, B2K060, P0A567, A7GKYO, Q2YW66, Q99RD4, P0C934, B5RFR1, P21160, B4SZ39, P72138, P24094, P29725, Q49771, POC8S3, Q9HZ76, Q7A3K7, A1AHW4, P54925, A7XOP5, Q5HD61, Q6G6H5, P19993, Q8XAR8, Q50397, Q5PKK8, Q9ZGM1, Q9ZJ31, 031357, P9WIN6, P37778, A8G840, Q8CN38, Q6CZF0, P9WP32, Q2FZP7, P41484, Q3S2Y1, P24093, Q5PKK9, POA4V5, BORVK6, Q83ELO, Q72U69, P0C223, P9WIN7, P37744, Q31UJ1, Q4L9R5, Q8FBP7, P9WNZ7, A6QFM7, P9WIM6, P77293, P43313, B5EZ54, POC2T1, Q329X2, Q7A3J9, T2GP47, Q45011, Q5XDI6, P55253, Q329X1, Q9ZCX6, Q7MYM4, POC1D7, Q99V75, P9WIM7, Q9JRN5, 068770, B5RFQ9, Q2YKY9, Q83IX6, Q9CCP6, P9WK74, Q83CY8, Q8P280, POC7J4, Q83PH8, Q7DBF7, B1JPF1, P0A647, Q6GARO, Q50703, Q51366, P9WNB3, B4TB27, P19361, P29229, A5U2B3, POA5J1, POA3U8, POA4G2, P55257, A9MXG7, Q79FU3, B4TB25, P40136, Q3S2Y2, Q6FFS6, Q56598, Q93GW2, B7MR15, P14062, P21875, Q01411, A0A0H3M9Z0, P17953, P9WNF3, P27830, B7UNB1, Q5HLD2, C6DHE2, Q9ZKJ5, Q4L8Y7, P9WIB5, Q56623, P19421, C4ZZ61, P9WQP2, Q45206, 085342, P31502, P25393, P0A669, 066251, C0Q3A8, Q49WH7, B4TNU5, P9WPS9, Q9ZH99, Q9A1S2, Q57301, P35635, B1JPZ8, Q06947, Q45209, P37753, P9WK65, P9WPE4, 052957, Q52938, A7ZTZ8, P9WIB4, Q8ZAE3, Q06972, A9WNAO, Q56127, Q06953, 088005, P37458, P31951, Q8FBQ3, P62586, AOQWU8, P15599, Q05868, P18481, B2TTZ8, Q79FW5, POAAA7, Q06981, Q48485, PODMDO, P37747, G4WJD3, Q1CBP1, A5U3Q3, A1JI79, P42216, P9WK75, 034194, P9WQN6, Q9JRN7, Q31UI9, P9WJQ1, A7MQI7, P15488, Q48481, P0DC91, P37785, P19422, B2K059, Q05862, A7FD60, P42217, POAOVO, P25734, P9WQN7, 083346, Q329X3, P9WJY7, A7ZTZ7, P11933, Q5L7M8, Q8DPY9, P68667, P60533, Q8ZAF1, 052956, Q8ZAF0, P0C7U7, P46733, POA5P3, P0A619, Q83DJ3, A1AHW2, POA5P9, Q8XAQ5, P04953, Q56872, Q2YKV1, Q2G1T6, 034191, Q6G2B4, P9WQN8, B7L8D5, A9R9H4, P9WK55, POA5N9, P9WG65, Q5HLV2, QOSYY5, P9W101, B5YY42, P19528, Q7BJX9, Q53107, Q2YW63, D3QY10, Q6G2B3, A1KQD8, B3FN88, A4TSQ1, P42218, P15598, P08180, Q4UNEO, Q1CBP0, P9WHW9, B5RFR0, Q00045, Q89ZXO, Q00474, Q8NUU9, P26879, Q9R3F2, Q83CP9, Q8Z397, Q9X6BO, Q7BHI8, P23033, Q03155, Q9AJ83, B614D0, POA5Q7, B2TTZ9, Q00046, A4Q8F7, P61711, Q45208, POA521, Q6FYW8, P94217, A8G842, P69957, P18010, P26194, 051401, Q52658, Q8ZAF2, Q81U45, Q31UJ0, P57039, Q8X7P7, P26397, Q47592, P9WPE6, P46815, P38016, B1XAG4, P69958, POCAX7, 032606, P58827, Q9AJ37, B7LU63, 033075, Q3YVG9, Q83E37, 031314, P26398, Q2SYH7, Q05433, AOR006, Q83E09, Q83IX5, P21207, P9WIP0, P9WIR0, P80069, Q9AJ79, QOTAS9, P9WIM8, P26880, P02970, 030511, P14168, G3XD01, P24251, B4TNU7, Q8VQ99, C6DHE4, P23995, P9WIP1, P9WIR1, P46842, Q9AJ77, Q8Z386, P9WIM9, P26881, P14190, C5WO22, P26402, P27829, POABW7, B7NTE9, P31631, Q66G05, P69960, POA5Q5, P9WIR3, P9WIR6, Q9AJ80, A9MJ15, P0C873, Q7ARC3, P14191, P18009, Q99191, P27832, P9WPH9, C4ZZ60, Q7A423, P27836, P15917, B2RHG2, P25732, Q48919, Q9AJ82, B5FN88, P68588, P37919, Q6E7F2, D2AJUO, P26400, B2K058, P9WJD8, B7MH59, Q6GED5, B7NFAO, P42502, B2RHG4, P9WIR2, Q9F9L1, Q9AJ63, Q5PKK7, P69966, P9WIZ7, P21982, A6QK59, Q50862, Q8XAQ8, P9WNK7, P45341, Q2FV55, POAC80, P23994, P9WIN8, P80200, Q9ZJD1, Q92JP8, Q8DVU8, POA5Y3, Q68X15, P52616, P99160, Q03584, B5YY41, POA565, QOTAT1, Q9KJT6, Q077R2, P42213, Q83A83, P55746, P56876, Q4UNI5, Q1RJI4, P9WGT6, Q8YD01, P13253, P60158, Q83DP8, B7M5E1, P9WNK6, Q3YVG8, Q97PA9, Q57HS4, Q47334, Q03490, P16626, P37915, Q9ZD49, Q92ID4, Q81TU1, P9WKW3, P11764, Q4L980, Q56128, B1XAG5, Q6E7F1, B7NTE7, Q83AY0, A4WG18, Q8X8T4, P46841, P60532, Q04971, Q9AJ81, Q4UM04, P69965, P44067, O51941, Q5HCQ9, P26401, Q0TAT0, P9WIQ7, B7N288, P36429, B4SZ38, Q9S5G5, Q7MXKO, P07889, B9J2U2, Q92JF7, P13422, P31522, Q83CZ8, Q06969, Q7A2K6, Q48475, A4TRB5, AOAOH2VDN9, B7NF98, Q53782, A9MXG5, Q01410, Q48899, P09239, Q6HNU4, Q3L8P3, Q83DN9, P68589, P34001, Q06973, Q79ZW0, Q03583, Q66G06, P9WNK2, Q1R4E3, Q7A2K8, Q6CZF2, Q9ZN40, 085343, P42384, Q5HH69, P0C1U6, P0AB36, P31527, Q48456, P05431, P18013, P26396, Q05032, P51836, Q9CNG8, Q99RX4, Q8Z388, P65301, A0Q4N6, Q00330, P76372, POA5P5, A4TRB4, P0A519, and P37741. In each of the above Uniprot records, the sequence of the protein antigen relevant for the present disclosure is version 1, as designated in the Uniprot record by the record number followed by “−1”. This sequence designation is unique and unchaging. For example, in the Uniprot record P37741 the the sequence of the protein antigen relevant for the present disclosure is designated in the Uniprot record as “P37741-1”.

[1954] In some embodiments the pathogen-associated disorder is a fungal disorder. For example, in some embodiments the pathogen-associated disorder is selected from the group consisting of Aspergillosis, Candidiasis, Coccidioidomycosis, Cryptococcus gattii infection, onychomycosis, microsporidiosis, mucormycosis, pneumocystis pneumonia, sporotrichosis, blastomycosis, Candida auris infection, Cryptococcus neoformans infection, fungal eye infection including keratitis and endophthalmitis, Histoplasmosis, mycetoma, dermatophytosis inc. tinea pedis tinea corporis, and talaromycosis.

[1955] In some embodiments the PAA is derived from a fungus. For example, in some embodiments the PAA is selected from the group consisting of Aspergillus sp., Candida sp. including C. albicans and C. auris, Coccidioides sp., Cryptococcus gattii, Pneumocystis jirovecii, Sporothrix sp., Blastomyces sp., Cryptococcus neoformans, Histoplasma sp., Talaromyces sp. including T. marneffei, Anncaliia algerae, A. connori, A. vesicularum, Encephalitozoon cuniculi, E. hellem, E. intestinalis, Enterocytozoon bieneusi, Microsporidium ceylonensis, M. africanum, Nosema ocularum, Pleistophora sp., Trachipleistophora hominis, T. anthropophthera, Vittaforma corneae, and Tubulinosema acridophagus.

[1956] In some embodiments the PAA is a fungal antigen. For example, in some embodiments the PAA is selected from the group consisting of the antigens having the following unique and stable UniProt entry identifier (see https://www.uniprot.org/help/entrv name): P87020, P43588, Q9UQY2, A6ZTR3, C5P230, Q1E3R8, B3STN5, Q4WMJ7, Q03392, Q08723, O13834, O94275, P20967, B2ZRS9, Q9XZV1, E9RCR4, P15873, Q9P7S2, P53549, E9CX44, O74531, P53119, Q95WA3, Q4WMJ1, POCB51, Q12377, P33298, P46589, 074783, P40985, Q95WA4, Q4WMJ9, Q59L12, P38204, 042931, Q1E8D2, Q09855, P24814, P00016, Q4WMJ8, G1UB63, Q03280, P41836, 074623, P87060, A4GYZO, P39940, Q4WMJ0, Q5AOX8, Q9UT05, 014250, 060022, Q5AB48, E9R9Y3, POCH07, Q9P3U4, Q59XX2, POCX83, 059770, Q9USX1, Q5F2J0, P46984, POCH09, P38199, P50142, O74440, Q10329, Q00746, O60182, Q4WMJ5, P38764, Q9USS7, Q00022, Q9US13, Q9UT97, P06104, Q5ABZ2, Q92211, P40016, Q1K9C4, Q03834, Q04062, P38624, O00103, POC7N7, Q04638, P38766, O60106, P25847, P87048, P25451, O00102, O74111, Q9US46, P35178, P38109, P25336, POCH06, P23724, P21734, Q8X082, Q5ALO3, P05759, Q10435, P32454, POCH08, Q12417, P52492, Q3E833, P40034, Q06103, P38202, P36049, QOC9L7, P21242, P15731, O14170, P36132, P53953, O14099, P53874, QOC9L6, Q9USQ9, POCG72, P25375, P38203, P38200, P34247, 042721, Q05583, P50086, Q08562, O94579, O74349, P52286, P38201, POCW95, P85437, P40303, Q09765, Q09682, Q04781, Q9Y709, 094264, Q12018, Q03071, 043063, P23566, 094393, P35728, P40482, Q10311, P38205, F2Z266, P25043, P38820, P40555, C5P3X6, P32565, 074549, 013959, Q5AMT2, Q01939, P0CG63, Q92462, P53152, Q12250, 013685, P38630, 043069, P40302, 042646, Q09841, P29469, P38886, P22515, P38629, P38862, P30657, Q02159, P30656, P39014, P41878, P46595, Q08273, P53323, 014126, 094609, P33297, P33310, P50524, P33296, P23639, Q01532, P36612, P52490, P40327, P33311, P32496, Q99344, P32379, P07267, P23638, Q9P7R4, P33299, Q2UNX8, P20606, P52491, 074445, P00729, P18239, P28263, 094517, Q8TGEO, 094672, 074810, 074894, 013807, P37898, 013731, P21243, P36113, 074873, P15732, Q9UTG2, QOC9L4, 074762, P19812, Q09720, POCW94, Q9UU15, Q07963, 014326, QOC9L5, 042897, P33202, P22141, O74983, P15303, P54860, 075004, 013790, Q10335, 060152, P30655, Q8TG42, POC8R3, Q5AJCO, Q03705, P15646, P40825, Q9C1X4, Q9Y7T8, Q9HFP8, Q01475, Q9UTN8, O94444, and Q9Y818. In each of the above Uniprot records, the sequence of the protein antigen relevant for the present disclosure is version 1, as designated in the Uniprot record by the record number followed by “−1”. This sequence designation is unique and unchaging. For example, in the Uniprot record Q9Y818 the the sequence of the protein antigen relevant for the present disclosure is designated in the Uniprot record as “Q9Y818-1”.

[1957] In some embodiments the pathogen-associated disorder is a protozoan disorder. For example, in some embodiments the pathogen-associated disorder is selected from the group consisting of Acanthamoeba keratitis, African trypanosomiasis, Avian malaria, Babesiosis, Besnoitiosis, Blastocystosis, Chagas disease, Cryptosporidiosis, Cyclosporiasis, Dientamoebiasis, Giardiasis, Histomoniasis, Malaria, Premunity, Sappinia amoebic encephalitis, Surra, Toxoplasmosis, Trichomoniasis, and Trypanosomiasis.

[1958] In some embodiments the PAA is derived from a protozoa. For example, in some embodiments the PAA is selected from the group consisting of Acanthamoeba, Trypanosoma sp. including T. brucei, T. cruzi, and T. evansi, Plasmodium sp. including P. falciparum, P. vivax, P. ovale, P. malariae, P. knowlesi, P. relictum, P. anasum, and P. gallinaceum, Hemoproteus sp., Babesia sp., Besnoitia sp., Blastocystis sp., Cryptosporidium sp. including C. parvum and C. hominis, Cyclospora cayetanensis, Dientamoeba fragilis, Giardia so. including G. lamblia and G. intestinalis, Histomonas meleagridis, Sappinia sp. including S. diploidea and S. pedata, Toxoplasma gondii, and Trichomonas vaginalis.

[1959] In some embodiments the PAA is a protozoan antigen. For example, in some embodiments the PAA is selected from the group consisting of the antigens having the following unique and stable UniProt entry identifier (see https://www.uniprot.org/help/entry name): A0A074T1L1, A0A0S4KF97, A0A0S4JQZ4, A0A0S4JAS1, A0A0S4J2H8, A0A0S4J8R3, A0A0S4IP92, A0A0S4IVI6, A0A074SMM4, A0A0S4JU95, A0A0S4JUU2, A0A0S4J2G0, A0A0S4JKP3, A0A0S4JNU2, A0A0S4J4S8, A0A0S4J1D6, A0A0S4JJ69, A0A0S4JQW3, A0A0S4KGR9, A0A0S4JOSO, A0A0S4IJQ6, A0A0S4J021, A0A0S4JLK8, A0A0S4JET1, A0A0S4IM54, A0A0S4JTM6, A0A0S4JEP5, A0A0S4IXR8, A0A0S4J1A6, A0A0S4IT85, A0A0S4JB95, A0A0S4IP11, A0A0S4JG58, A0A0S4J014, A0A0S4JAG3, A0A0S4JBV9, A0A0S4IMDO, A0A0S4KGC5, A0A0S4IKB9, A0A0S4JMF9, A0A0S4JJX3, A0A0S4IVI8, A0A074TOF7, A0A0S4KMS7, A0A0S4IQ67, A0A0S4JAF7, A0A0S4J3C2, A0A0S4J897, A0A0S4J998, A0A0S4JAD5, A0A074SUM1, A0A0S4ITE7, A0A0S4IJN2, A0A0S4KHF9, A0A0S4J6W7, A0A0S4J872, A0A0S4JS05, A0A0S4JQZO, A0A074TVK6, B6DTN7, A0A0S4KLY4, A0A0S4JS11, A0A0S4J353, A0A0S4IXE4, A0A0S4J7G3, A0A0S4J4W4, A0A074TOB9, A0A0S4IXG7, A0A0S4IVU4, A0A0S4JB29, A0A0S4IIQ2, A0A0S4JB24, A0A0S4J5S1, A0A0S4IZD9, A0A074TOJ3, A0A0S4JL29, A0A0S4IR72, A0A0S4JB58, A0A0S4JB16, A0A0S4IL58, A0A074STGO, A0A0S4JJQ5, A0A074T2W9, A0A0S4JBM4, A0A0S4IXS4, A0A0S4JXN2, A0A0S4ILC9, A0A0S4IW93, A0A0S4JIN3, A0A0S4KK21, A0A074TOJ7, A0A0S4JD35, A0A0S4IS00, A0A0S4JBS2, A0A0S4J5K3, A0A0S4J654, A0A0S4IJSO, A0A0S4J299, A0A074TCC9, A0A0S4J4B4, A0A0S4JON5, A0A0S4IRK3, A0A0S4JNX5, A0A0S4J9S4, A0A0S4JUB6, A0A0S4JDR2, A0A074T113, A0A0S4J954, A0A0S4KLL4, A0A0S4KEG2, A0A0S4J8T9, A0A0S4JJVO, A0A0S4JF82, A0A0S4J7H1, A0A074TWU5, A0A0S4JF41, A0A0S4JFAO, A0A0S4JS89, A0A0S4JE28, A0A0S4KFY6, A0A0S4J5C1, A0A0S4J603, A0A074T241, A0A0S4IL47, A0A0S4J985, A0A0S4IT79, A0A0S4JHS5, A0A0S4JCG7, A0A0S4KQ64, A0A0S4JQ27, A0A074SL18, A0A0S4J840, A0A0S4JIC5, A0A0S4KEN7, A0A0S4IPW7, A0A0S4IR61, A0A0S4IS67, A0A0S4IMD6, A0A074SV31, A0A0S4JEJ4, A0A0S4KIF1, A0A0S4JD68, A0A0S4JLCO, A0A0S4JTS4, A0A0S4JNW2, A0A0S4JRC8, A0A074SKW9, A0A0S4IZX6, A0A0S4JHEO, A0A0S4JT29, A0A0S4JSD2, A0A0S4J100, A0A0S4J3U1, A0A0S4IMY9, A0A0S4JMU5, A0A0S4J9N3, A0A0S4IVH1, A0A0S4JQW5, A0A0S4IS12, A0A0S4JAQ6, A0A0S4JC49, A0A0S4JDY8, A0A0S4JN05, A0A0S4ILK6, A0A0S4JHG5, A0A0S4KGV4, A0A0S4J515, A0A0S4IQA7, A0A0S4IV27, A0A0S4JAM9, A0A0S4JJG5, A0A0S4JQB6, A0A0S4JLH4, A0A0S4IVN7, A0A0S4JEZ5, A0A0S4IM08, A0A0S4IH88, A0A0S4JLB2, A0A0S4JEE7, A0A0S4IVX6, A0A0S4IU55, A0A0S4IN83, A0A0S4IZ03, A0A0S4IVV6, A0A0S4KEL3, A0A0S4ISG8, A0A0S4JV10, A0A0S4IIK7, A0A0S4JC54, A0A0S4IKB3, A0A0S4J7S2, A0A0S4JD74, A0A0S4JQ06, A0A0S4J746, A0A0S4JA77, A0A0S4JF29, A0A0S4JAE3, A0A0S4JFY5, A0A0S4JMQ7, A0A0S4J7Q5, A0A0S4J1U3, A0A0S4KK93, A0A0S4IHU9, A0A0S4J2L4, A0A0S4ITD5, A0A0S4JTQ7, A0A0S4JP32, A0A0S4IWS5, A0A0S4JB17, A0A0S4ILT2, A0A0S4JLL8, A0A0S4JDS1, A0A0S4JBL4, A0A0S4JU85, A0A0S4JRD7, A0A0S4J2K2, A0A0S4IU91, A0A0S4IXT3, A0A0S4KJT6, A0A0S4JFC9, A0A0S4JNK9, A0A0S4JV99, A0A0S4JVN7, A0A0S4J113, A0A0S4JAQ3, A0A0S4IXN5, A0A0S4ILX2, A0A0S4IQE4, A0A0S4KF94, A0A0S4JEZ2, A0A0S4IK14, A0A0S4KEC2, A0A0S4JE78, A0A0S4IND6, A0A0S4J3T7, A0A0S4JTK3, A0A0S4JJFO, A0A0S4IMBO, A0A0S4JL12, A0A0S4IQP3, A0A0S4JV52, A0A0S4ITN5, A0A0S4J2M0, A0A0S4IX99, A0A0S4J6B1, A0A0S4JOU7, A0A0S4IMZO, A0A0S4J7H0, A0A0S4JF05, A0A0S4JGN7, A0A0S4KK37, A0A0S4JDTO, A0A0S4JS26, A0A0S4JD14, A0A0S4ITR1, A0A0S4JOH7, A0A0S4J260, A0A0S4JWD6, A0A0S4J8Q8, A0A0S4JE04, A0A0S4JNM8, A0A0S4J7L5, A0A0S4JP43, A0A0S4J3A2, A0A0S4IXY3, A0A0S4J419, A0A0S4JOZO, A0A0S4IY44, A0A0S4JRN5, A0A0S4KHD7, A0A0S4JOFO, A0A0S4J4L7, A0A0S4J539, A0A0S4J3Q1, A0A0S4J542, A0A0S4IL46, A0A0S4KL26, A0A0S4JEG7, A0A0S4JVS2, A0A0S4KP55, A0A0S4JOG9, A0A0S4JJ63, A0A0S4IP14, A0A0S4J8P6, A0A0S4J2R4, A0A0S4J761, A0A0S4IJN8, A0A0S4JSG5, A0A0S4IP99, A0A0S4JHM1, A0A0S4IN27, A0A0S4KEC0, A0A0S4JSC5, A0A0S4J4G2, A0A0S4JAN4, A0A0S4JEP2, A0A0S4J9M5, A0A0S4ISU4, A0A0S4J604, A0A0S4ILR7, A0A0S4JGL5, A0A0S4JOKO, A0A0S4JSB8, A0A0S4JLZO, A0A0S4JOQ7, A0A0S4IVU5, A0A0S4J1U5, A0A0S4IQP4, A0A0S4IT62, A0A0S4JUR5, A0A0S4IU73, A0A0S4J6BO, A0A0S4JCX5, A0A0S4JCT9, A0A0S4J2U8, A0A0S4KJA7, A0A0S4J8U4, A0A0S4JS12, A0A0S4JWB3, A0A0S4ISN8, A0A0S4JDX7, A0A0S4J592, A0A0S4IU40, A0A0S4IJ71, A0A0S4J3B3, A0A0S4JCC6, A0A0S4JAU0, A0A0S4J360, A0A0S4JG36, A0A0S4JNL2, A0A0S4IWB9, A0A0S4J805, A0A0S4JMGO, A0A0S4JG17, A0A0S4J206, A0A0S4J4C3, A0A0S4ILW5, A0A0S4KIB1, A0A0S4JZB5, A0A0S4IR85, A0A0S4IVQ8, A0A0S4JSH3, A0A0S4KIR5, A0A0S4JK76, A0A0S4IZC7, A0A0S4JSA1, A0A0S4JJG7, A0A0S4IMS3, A0A0S4IY39, A0A0S4IWU0, A0A0S4J4P0, A0A0S4JEG9, A0A0S4IW61, A0A0S4ITN3, A0A0S4J2P7, A0A0S4IS4I, A0A0S4KMV2, A0A0S4J278, A0A0S4JVZ3, A0A0S4JU20, A0A0S4JPM5, A0A0S4IRQ2, A0A0S4JTY6, A0A0S4J814, A0A0S4J2V2, A0A0S4IVC7, A0A0S4IZW2, A0A0S4JH12, A0A0S4JU35, A0A0S4J6M1, A0A0S4JMU7, A0A0S4JLM8, A0A0S4JMV1, A0A0S4JEK1, A0A0S4J5X0, A0A0S4JL76, A0A0S4JJI3, A0A0S4JPN6, A0A0S4J254, A0A0S4IQ10, A0A0S4KK75, A0A0S4JEXO, A0A0S4JEH8, A0A0S4IV96, A0A0S4JFV3, A0A0S4IZX5, A0A0S4KIT5, A0A0S4JAW7, A0A0S4IIS0, A0A0S4J5A0, A0A0S4KHE4, and A0A0S4IUK8. In each of the above Uniprot records, the sequence of the protein antigen relevant for the present disclosure is version 1, as designated in the Uniprot record by the record number followed by “−1”. This sequence designation is unique and unchaging. For example, in the Uniprot record A0A0S4IUK8 the the sequence of the protein antigen relevant for the present disclosure is designated in the Uniprot record as “A0A0S4IUK8-1”.

[1960] In some embodiments the pathogen-associated disorder is a parasitical disorder. For example, in some embodiments the pathogen-associated disorder is selected from the group consisting of Echinococcosis, Amebiasis, Ancylostomiasis, Angiostrongyliasis, Anisakiasis, Ascariasis, Balantidiasis, Granulomatous Amebic Encephalitis, Baylisascariasis, Schistosomiasis, Capillariasis, Clonorchiasis, Cysticercosis, Diphyllobothriasis, Filariasis, Enterobiasis, Fascioliasis, Fasciolopsiasis, gnathostomiasis, Heterophyiasis, Hymenolepiasis, Leishmaniasis, Opisthorchiasis, Loiasis, Onchocerciasis, Paragonimiasis, Sarcocystosis, Taeniasis, Toxocariasis, Trichinellosis, and Trichuriasis.

[1961] In some embodiments the PAA is derived from a parasite. For example, in some embodiments the PAA is selected from the group consisting of Echinococcus sp. including E. granulosus and E. multilocularis, Entamoeba histolytica, Ancylostoma sp. including A. brazilense, A. caninum, and A. ceylanicum, Uncinaria stenocephala, Angiostrongylus sp. including Angiostrongylus cantonensis, Ascaris sp. including A. lumbricoides and A. suum, Balantidium coli, Balamuthia mandrillaris, Baylisascaris procyonis, Schistosoma sp. including S. mansoni, S. haematobium, and S. japonicum, Capillaria hepatica, Capillaria philippinensis, Clonorchis sp., Taenia sp. including T. solium, T. saginata, and T. asiatica, Diphyllobothrium sp. including Diphyllobothrium latum, Dipylidium sp., Dracunculus medinensis, Enterobius vermicularis, Fasciola sp. including Fasciola hepatica, Fasciolopsis buski, Gnathostoma sp., Heterophyes heterophyes, Naegleria fowleri, Onchocerca volvulus, Paragonimus sp., Sarcocystis sp., Strongyloides sp., Toxocara canis, Toxocara cati, and Trichinella sp..

[1962] In some embodiments the PAA is a parasitical antigen. For example, in some embodiments the PAA is selected from the group consisting of the antigens having the following unique and stable UniProt entry identifier (see https://www.uniprot.org/help/entry name): B6KAMO, P90661, Q81E47, P14593, P18269, Q4U9M9, P23253, P13826, P50498, P04934, P13828, P13814, P50490, P19597, P02897, P02890, P09792, Q02752, P18270, P06914, P15714, P08569, P68874, P06016, P08515, Q8MZJ8, P15964, P08676, P22622, P08677, Q25540, P02892, P87020, P42665, P18271, P13815, P20287, 096175, P35661, P08418, P29030, P62884, P67877, Q07828, P50491, C6KTB7, P04926, P02894, Q9TY95, Q5F2J0, Q03400, P08675, Q95WA4, Q9F9F2, P35666, Q9AJ37, Q81E95, P09841, Q95WA3, P04922, P50492, P08672, Q05870, P05691, Q25619, P26332, Q03994, P08673, P19260, P06015, P31008, P17503, P16445, P02893, P67878, P15744, Q9XZV1, P08307, P21849, P32072, P69192, P22545, Q815D2, P08674, P14223, Q4UNEO, P61074, Q4FX73, P22621, P26694, P54190, Q25306, P13399, Q01443, P02898, Q4UM04, P81860, Q81KW2, P26624, P06915, P50489, Q4UN15, Q7KQM2, P02891, B6KV60, Q03110, P21303, P62883, B3STN5, and P23093. In each of the above Uniprot records, the sequence of the protein antigen relevant for the present disclosure is version 1, as designated in the Uniprot record by the record number followed by “−1”. This sequence designation is unique and unchaging. For example, in the Uniprot record P23093 the the sequence of the protein antigen relevant for the present disclosure is designated in the Uniprot record as “P23093-1”.

[1963] In some embodiments the pathogen-associated disorder is a prion disorder. For example, in some embodiments the pathogen-associated disorder is selected from the group consisting of Creutzfeldt-Jakob disease (CJD) including iatrogenic, variant, familial, and sporadic sub-types, fatal familial insomnia (FFI), Gertsmann-Straussler-Scheinker syndrome (GSS), kuru, and variably protease-sensitive prionopathy (VPSPr).

[1964] In some embodiments the PAA is derived from a prion protein. For example, in some embodiments the PAA is selected from the group consisting of PrP^{C}, PrP^{res}, and PrP^{Sc}. In some embodiments, PrP^{C} as referred to herein corresponds to Unipot entry ID P04156; the protein sequence is identified by the Uniprot accession number P04156-1.

[1965] In some embodiments the pathogen-associated disorder is a protein aggregate disorder. For example, in some embodiments the pathogen-associated disorder is selected from the group consisting of Alzheimer's disease, Cerebral p-amyloid angiopathy, Retinal ganglion cell degeneration in glaucoma, Parkinson's disease and other synucleinopathies, Tauopathies, Frontotemporal lobar degeneration, FTLD-FUS, Amyotrophic lateral sclerosis (ALS), Huntington's disease, Familial British dementia, Familial Danish dementia, Hereditary cerebral hemorrhage with amyloidosis, CADASIL, Alexander disease, Seipinopathies, Familial amyloidotic neuropathy, Senile systemic amyloidosis, Serpinopathies, AL amyloidosis, AH amyloidosis, AA amyloidosis, Type II diabetes, Aortic medial amyloidosis, ApoAl amyloidosis, ApoAll amyloidosis, ApoAIV amyloidosis, Familial amyloidosis of the Finnish type (FAF), Lysozyme amyloidosis, Fibrinogen amyloidosis, Dialysis amyloidosis, Inclusion body myositis/myopathy, Cat Retinitis pigmentosa with rhodopsin mutations, Medullary thyroid carcinoma, Cardiac atrial amyloidosis, Pituitary prolactinoma, Hereditary lattice corneal dystrophy, Cutaneous lichen amyloidosis, Mallory bodies, Multiple System Atrophy, Corneal lactoferrin amyloidosis, Pulmonary alveolar proteinosis, Odontogenic (Pindborg) tumor amyloid, Seminal vesicle amyloid, Apolipoprotein C2 amyloidosis, Apolipoprotein C3 amyloidosis, Lect2 amyloidosis, Insulin amyloidosis, Galectin-7 amyloidosis (primary localized cutaneous amyloidosis), Corneodesmosin amyloidosis, Enfuvirtide amyloidosis, Cystic fibrosis, and Sickle cell disease.

[1966] In some embodiments the PAA is derived from an aggregate protein. For example, in some embodiments the PAA is selected from the group consisting of Amyloid β peptide (Ap; uniprot ref. P05067), Tau (P10636), a-Synuclein (P37840), Fused in sarcoma (FUS) protein (P35637), Superoxide dismutase (P00441), TDP-43 (Q13148), C90RF72 (Q96LT7), ubiquilin-2 (UBQLN2) (Q9UHD9), Huntingtin (P42858), ABri (Q9Y287), Cystatin C (P01034), Notch3 (Q9UM47), Glial fibrillary acidic protein (GFAP; P14136), Seipin (Q96G97), Transthyretin (P02766), Serpins (P01009 & others), immunoglobulin light chains (P01834 & others), Immunoglobulin heavy chains (P01857 & others), Amyloid A protein (PODJI8), Islet amyloid polypeptide (amylin; P10997), Medin (lactadherin; Q08431), Apolipoprotein A1 (P02647), Apolipoprotein AII (P02652), Apolipoprotein AIV (P06727), Gelsolin (P06396), Lysozyme (P61626), Fibrinogen (P02671, P02675), Beta-2 microglobulin (P61769), Crystallins (P02489 & others), Rhodopsin (P08100), Calcitonin (P01258), Atrial natriuretic factor (P01160), Prolactin (P01236), Keratoepithelin (Q15582), Keratins (Q14533 & others), Keratin intermediate filament proteins (P35908 & others), Lactoferrin (P02788), Surfactant protein C (SP-C) (P11686), Odontogenic ameloblast-associated protein (A1E959), Semenogelin I (P04279), Apolipoprotein C2 (ApoC2) (P02655), Apolipoprotein C3 (ApoC3) (P02656), Leukocyte chemotactic factor-2 (Lect2) (014960), Insulin (P01308), Galectin-7 (Gal7) (P47929), Corneodesmosin (Q15517), CFTR protein (P13569), and Hemoglobin (P69905 & P68871). In each of the above Uniprot records, the sequence of the protein antigen relevant for the present disclosure is version 1, as designated in the Uniprot record by the record number followed by “−1”. This sequence designation is unique and unchaging. For example, in the Uniprot record P68871 the the sequence of the protein antigen relevant for the present disclosure is designated in the Uniprot record as “P68871-1”.

[1967] Subject Selection

[1968] In certain aspects, the subjects are selected as suitable for treatment with the treatments before the treatments are administered. In some aspects the treatment methods described herein include the step of selecting suitable subjects. In some aspects the treatment methods described herein treat subjects that have been previously selected as suitable for treatment.

[1969] As used herein, subjects who are considered suitable for treatment are those subjects who are expected to benefit from, or respond to, the treatment. Subjects may have, be suspected of having, have been diagnosed with, or be at risk of, a disorder characterized by a disorder-associated antigen (DAA) as described herein.

[1970] In some aspects the treated subject has been selected for treatment on the basis that the subject has, is suspected of having, has been diagnosed with, or is at risk of, a disorder characterized by a disorder-associated antigen (DAA).

[1971] In some aspects the subject is: (1) selected for treatment on the basis that the subject has, is suspected of having, has been diagnosed with, or is at risk of, a disorder characterized by a disorder-associated antigen (DAA); then (2) treated with a CD25-ADC as described herein.

[1972] In particular, the disorder characterized by a disorder-associated antigen (DAA) may be solid tumour as described herein.

[1973] In some aspects, subjects are selected on the basis of the amount or pattern of expression of CD25. In some aspects, the selection is based on expression of CD25 at the cell surface in a tissue or structure of interest. So, in some cases, subjects are selected on the basis they have, or are suspected of having, are at risk of having, or have received a diagnosis of a proliferative disease characterized by the presence of a neoplasm comprising or associated with cells having surface expression of CD25. The neoplasm may be composed of cells having surface expression of CD25.

[1974] In some aspects, subjects are selected on the basis they have a neoplasm comprising both CD25+ve and CD25-ve cells. The neoplasm may be composed of CD25-ve neoplastic cells, optionally wherein the CD25-ve neoplastic cells are associated with CD25+ve non-neoplastic cells such as CD25+ve Tregs. The neoplasm or neoplastic cells may be all or part of a solid tumour. The solid tumour may be partially or wholly CD25-ve, and may be infiltrated with CD25+ve cells, such as CD25+ve Tregs. In preferred aspects, the solid tumour is associated with high-levels of CD25+ve infiltrating cells, such as Treg cells. In some aspects, the solid tumour is associated with low-levels of CD25+ve infiltrating cells, such as Treg cells. In some aspects, the solid tumour is not associated with CD25+ve infiltrating cells, such as Treg cells; for example, the levels of CD25+ve cells may be below the detection limit.

[1975] In some cases, expression of CD25 in a particular tissue of interest is determined. For example, in a sample of tumor tissue. In some cases, systemic expression of CD25 is determined. For example, in a sample of circulating fluid such as blood, plasma, serum or lymph.

[1976] In some aspects, the subject is selected as suitable for treatment due to the presence of CD25 expression in a sample. In those cases, subjects without CD25 expression may be considered not suitable for treatment.

[1977] In other aspects, the level of CD25 expression is used to select a subject as suitable for treatment. Where the level of expression of the target is above a threshold level, the subject is determined to be suitable for treatment.

[1978] In some aspects, an subject is indicated as suitable for treatment if cells obtained from the tumour react with antibodies against CD25 as determined by IHC.

[1979] In some aspects, a subject is determined to be suitable for treatment if at least 5%, 10%, 15%, 20%, 25%, 30%, 35%, 40%, 45%, 50%, 55%, 60%, 65%, 70%, 75%, 80%, 85%, 90% or more of all cells in the sample express CD25. In some aspects disclosed herein, a subject is determined to be suitable for treatment if at least at least 5% of the cells in the sample express CD25.

[1980] Treatment of Established Tumours & Reduction of Metastatic Tumours

[1981] The methods described and exemplified herein have been shown to be effective at treating established tumous in naïve subjects as well as the reduction or prevention of metastatic tumours in previously treated subjects.

[1982] Accordingly, in some aspects a subject is selected for treatment if they have, are suspected of having, have been diagnosed with, or are at risk of, an established tumour, such as an established solid tumour. An ‘establised tumour’ as described herein may be, for example, a tumour diagnosed or identified in a naïve subject.

[1983] In some cases a naïve subject is a subject that has not yet been treated to reduce the immune-suppressive activity of an immune regulatory cell population, as defined herein; for example; treated with an anti-CD25 antibody or a CD25-ADC. In some cases a naïve subject is a subject that has not yet been treated with ADCx25, as defined herein.

[1984] In some cases, an ‘establised tumour’ as described herein may be a relapsed or resistant tumour. For example, a relapsed tumour may a new or growing tumour identified or diagnosed in a subject following a period of remission (partial or complete). The tumour may be metastatic or in the same site as the primary tumour.

[1985] In some aspects a subject is selected for treatment if they have, are suspected of having, have been diagnosed with, or are at risk of, a circulating tumour or circulating tumour cells (CTC; Gupta et al. 2006, Cell. 127 (4): 679-95; Rack et al., 2014. Journal of the National Cancer Institute. 106 (5)). The CTCs may be, or comprise, metastatic cells (i.e. CTCs capable of establishing metastatic tumours in a subject).

[1986] Subjects suspected of having, have been diagnosed with, or are at risk of, a circulating tumour or circulating tumour cells may include;
[1987] (1) subjects who have, are suspected of having, have been diagnosed with a primary tumour with metastatic characteristics, such as high-metastatic prognosis or elevated expression of one or more biomarkers of metastatic cancer (Dawood, S., Expert Rev Mol Diagn. 2010 July; 10(5):581-90);
[1988] (2) subjects who have, are suspected of having, have been diagnosed with one or more metastatic tumours;
[1989] (3) pre-operative or post-operative subjects, wherein the operation is to remove part or all of a solid tumour. Typically, selected pre-operative or post-operative subjects start their treatment not more than 4 weeks from the operation date, such as not more than 2 weeks, or not more than 1 week.

[1990] In some cases, a ‘metastatic tumour’ as described herein may be a tumour not located in the same site as the primary tumour.

[1991] Adoptive Cell Transfer

[1992] As described herein, the present authors observed that in 2 subjects with AML who had previously received bone marrow stem cell transfers, administration of ADCx25 led to complete remission of the AML.

[1993] In some aspects the subject is selected for treatment on the basis they have received an adoptive cell transfer.

[1994] In some embodiments the subject is only selected if they have, are suspected of having, have been diagnosed with, or are at risk of, a disorder characterized by a disorder-associated antigen (DAA); in some embodiments the disorder is AML.

[1995] The cells transferred during the adoptive cell transfer may be autologous or allogenic cells. The transferred cells may be stem cells, such as stem cells derived from bone marrow. The transferred cells may be immune cells

[1996] The adoptive cell transfer may be a bone marrow transplant.

[1997] In some cases the subject is only selected for treatment with a CD25-ADC if they received the adoptive cell transfer at least 3 months, at least 6 months, at least 9 months, at least 12 months, or at least 18 months before the administration of the CD25-ADC. In some cases, the subject is only selected for treatment with a CD25-ADC if they received the adoptive cell transfer at least 24 months before the administration of the CD25-ADC

[1998] In some cases the ADC25-ADC is administered to selected subjects in a QW dosage regime. In some cases the dose of CD25-ADC administered is 10, 20, 25, 27.5, 30, 32.5, 35, 37.5, 40, 42.5, 45, 47.5, 50, 55, 60, 65, 70, 75, or 80 μg/kg. For example 30 or 37.5 μg/kg of CD25 ADC may be administered in a QW dosage regime.

[1999] Samples

[2000] The sample may comprise or may be derived from: a quantity of blood; a quantity of serum derived from the subject's blood which may comprise the fluid portion of the blood obtained after removal of the fibrin clot and blood cells; a quantity of pancreatic juice; a tissue sample or biopsy, in particular from a solid tumour; or cells isolated from said subject.

[2001] A sample may be taken from any tissue or bodily fluid. In certain aspects, the sample may include or may be derived from a tissue sample, biopsy, resection or isolated cells from said subject.

[2002] In certain aspects, the sample is a tissue sample. The sample may be a sample of tumor tissue, such as cancerous tumor tissue. The sample may have been obtained by a tumor biopsy. In some aspects, the sample is a lymphoid tissue sample, such as a lymphoid lesion sample or lymph node biopsy. In some cases, the sample is a skin biopsy.

[2003] In some aspects the sample is taken from a bodily fluid, more preferably one that circulates through the body. Accordingly, the sample may be a blood sample or lymph sample. In some cases, the sample is a urine sample or a saliva sample.

[2004] In some cases, the sample is a blood sample or blood-derived sample. The blood derived sample may be a selected fraction of a subject's blood, e.g. a selected cell-containing fraction or a plasma or serum fraction.

[2005] A selected cell-containing fraction may contain cell types of interest which may include white blood cells (WBC), particularly peripheral blood mononuclear cells (PBC) and/or granulocytes, and/or red blood cells (RBC). Accordingly, methods according to the present disclosure may involve detection of CD25 polypeptide or nucleic acid in the blood, in white blood cells, peripheral blood mononuclear cells, granulocytes and/or red blood cells.

[2006] The sample may be fresh or archival. For example, archival tissue may be from the first diagnosis of a subject, or a biopsy at a relapse. In certain aspects, the sample is a fresh biopsy.

[2007] Subject Status

[2008] The subject may be an animal, mammal, a placental mammal, a marsupial (e.g., kangaroo, wombat), a monotreme (e.g., duckbilled platypus), a rodent (e.g., a guinea pig, a hamster, a rat, a mouse), murine (e.g., a mouse), a lagomorph (e.g., a rabbit), avian (e.g., a bird), canine (e.g., a dog), feline (e.g., a cat), equine (e.g., a horse), porcine (e.g., a pig), ovine (e.g., a sheep), bovine (e.g., a cow), a primate, simian (e.g., a monkey or ape), a monkey (e.g., marmoset, baboon), an ape (e.g., gorilla, chimpanzee, orangutang, gibbon), or a human.

[2009] Furthermore, the subject may be any of its forms of development, for example, a foetus. In one preferred embodiment, the subject is a human. The terms “subject”, “patient” and “individual” are used interchangeably herein.

[2010] In some aspects the subject has, is suspected of having, has been diagnosed with, or is at risk of, a disorder characterized by a disorder-associated antigen (DAA) as described herein.

[2011] In particular, the disorder characterized by a disorder-associated antigen (DAA) may be solid tumour as described herein.

[2012] Adoptive Cell Transfer

[2013] In some aspects the subject has received an adoptive cell transfer as defined herein.

[2014] Tumour Status

[2015] In some aspects the subject has an established tumour as defined herein. In some aspects the subject is suspected of having, has been diagnosed with, or is at risk of, a circulating tumour or circulating tumour cells. In some aspects the subject has a metastatic tumour as defined herein.

[2016] Controls

[2017] In some aspects, target expression in the individual is compared to target expression in a control. Controls are useful to support the validity of staining, and to identify experimental artefacts.

[2018] In some cases, the control may be a reference sample or reference dataset. The reference may be a sample that has been previously obtained from a individual with a known degree of suitability. The reference may be a dataset obtained from analyzing a reference sample.

[2019] Controls may be positive controls in which the target molecule is known to be present, or expressed at high level, or negative controls in which the target molecule is known to be absent or expressed at low level.

[2020] Controls may be samples of tissue that are from individuals who are known to benefit from the treatment. The tissue may be of the same type as the sample being tested. For example, a sample of tumor tissue from a individual may be compared to a control sample of tumor tissue from a individual who is known to be suitable for the treatment, such as a individual who has previously responded to the treatment.

[2021] In some cases the control may be a sample obtained from the same individual as the test sample, but from a tissue known to be healthy. Thus, a sample of cancerous tissue from a individual may be compared to a non-cancerous tissue sample.

[2022] In some cases, the control is a cell culture sample.

[2023] In some cases, a test sample is analyzed prior to incubation with an antibody to determine the level of background staining inherent to that sample.

[2024] In some cases an isotype control is used. Isotype controls use an antibody of the same class as the target specific antibody, but are not immunoreactive with the sample. Such controls are useful for distinguishing non-specific interactions of the target specific antibody.

[2025] The methods may include hematopathologist interpretation of morphology and immunohistochemistry, to ensure accurate interpretation of test results. The method may involve confirmation that the pattern of expression correlates with the expected pattern. For example, where the amount of CD25 expression is analyzed, the method may involve confirmation that in the test sample the expression is observed as membrane staining, with a cytoplasmic component. The method may involve confirmation that the ratio of target signal to noise is above a threshold level, thereby allowing clear discrimination between specific and non-specific background signals.

[2026] Methods of Treatment

[2027] The term “treatment,” as used herein in the context of treating a condition, pertains generally to treatment and therapy, whether of a human or an animal (e.g., in veterinary applications), in which some desired therapeutic effect is achieved, for example, the inhibition of the progress of the condition, and includes a reduction in the rate of progress, a halt in the rate of progress, regression of the condition, amelioration of the condition, and cure of the condition. Treatment as a prophylactic measure (i.e., prophylaxis, prevention) is also included.

[2028] The term “therapeutically-effective amount” or “effective amount” as used herein, pertains to that amount of an active compound, or a material, composition or dosage from comprising an active compound, which is effective for producing some desired therapeutic effect, commensurate with a reasonable benefit/risk ratio, when administered in accordance with a desired treatment regimen.

[2029] Similarly, the term “prophylactically-effective amount,” as used herein, pertains to that amount of an active compound, or a material, composition or dosage from comprising an active compound, which is effective for producing some desired prophylactic effect, commensurate with a reasonable benefit/risk ratio, when administered in accordance with a desired treatment regimen.

[2030] Disclosed herein are methods of therapy. Also provided is a method of treatment, comprising administering to a subject in need of treatment a therapeutically-effective amount of an ADC. The term “therapeutically effective amount” is an amount sufficient to show benefit to a subject. Such benefit may be at least amelioration of at least one symptom. The actual amount administered, and rate and time-course of administration, will depend on the nature and severity of what is being treated. Prescription of treatment, e.g. decisions on dosage, is within the responsibility of general practitioners and other medical doctors. The subject may have been tested to determine their eligibility to receive the treatment according to the methods disclosed herein. The method of treatment may comprise a step of determining whether a subject is eligible for treatment, using a method disclosed herein.

[2031] The ADC may comprise an anti-CD25 antibody. The anti-CD25 antibody may be HuMax-TAC™. The ADC may comprise a drug which is a PBD dimer. The ADC may be a anti-CD25-ADC, and in particular, ADCX25/ADCT-301/Camidanlumab Tesirine. The ADC may be an ADC disclosed in WO2014/057119.

[2032] The treatment may involve administration of the ADC alone or in further combination with other treatments, either simultaneously or sequentially dependent upon the condition to be treated. Examples of treatments and therapies include, but are not limited to, chemotherapy (the administration of active agents, including, e.g. drugs, such as chemotherapeutics); surgery; and radiation therapy.

[2033] A “chemotherapeutic agent” is a chemical compound useful in the treatment of cancer, regardless of mechanism of action. Classes of chemotherapeutic agents include, but are not limited to: alkylating agents, antimetabolites, spindle poison plant alkaloids, cytotoxic/antitumor antibiotics, topoisomerase inhibitors, antibodies, photosensitizers, and kinase inhibitors. Chemotherapeutic agents include compounds used in “targeted therapy” and conventional chemotherapy.

[2034] Examples of chemotherapeutic agents include: Lenalidomide (REVLIMID®, Celgene), Vorinostat (ZOLINZA®, Merck), Panobinostat (FARYDAK®, Novartis), Mocetinostat (MGCD0103), Everolimus (ZORTRESS®, CERTICAN®, Novartis), Bendamustine (TREAKISYM®, RIBOMUSTIN®, LEVACT®, TREANDA®, Mundipharma International), erlotinib (TARCEVA®, Genentech/OSI Pharm.), docetaxel (TAXOTERE®, Sanofi-Aventis), 5-FU (fluorouracil, 5-fluorouracil, CAS No. 51-21-8), gemcitabine (GEMZAR®, Lilly), PD-0325901 (CAS No. 391210-10-9, Pfizer), cisplatin (cis-diamine, dichloroplatinum(II), CAS No. 15663-27-1), carboplatin (CAS No. 41575-94-4), paclitaxel (TAXOL®, Bristol-Myers Squibb Oncology, Princeton, N.J.), trastuzumab (HERCEPTIN®, Genentech), temozolomide (4-methyl-5-oxo-2,3,4,6,8-pentazabicyclo [4.3.0] nona-2,7,9-triene-9-carboxamide, CAS No. 85622-93-1, TEMODAR®, TEMODAL®, Schering Plough), tamoxifen ((Z)-2-[4-(1,2-diphenylbut-1-enyl)phenoxy]-N,N-dimethylethanamine, NOLVADEX®, ISTUBAL®, VALODEX®), and doxorubicin (ADRIAMYCIN®), Akti-1/2, HPPD, and rapamycin.

[2035] More examples of chemotherapeutic agents include: oxaliplatin (ELOXATIN®, Sanofi), bortezomib (VELCADE®, Millennium Pharm.), sutent (SUNITINIB®, SU11248, Pfizer), letrozole (FEMARA®, Novartis), imatinib mesylate (GLEEVEC®, Novartis), XL-518 (Mek inhibitor, Exelixis, WO 2007/044515), ARRY-886 (Mek inhibitor, AZD6244, Array BioPharma, Astra Zeneca), SF-1126 (P13K inhibitor, Semafore Pharmaceuticals), BEZ-235 (P13K inhibitor, Novartis), XL-147 (P13K inhibitor, Exelixis), PTK787/ZK 222584 (Novartis), fulvestrant (FASLODEX®, AstraZeneca), leucovorin (folinic acid), rapamycin (sirolimus, RAPAMUNE®, Wyeth), lapatinib (TYKERB®, GSK572016, Glaxo Smith Kline), lonafarnib (SARASAR™, SCH 66336, Schering Plough), sorafenib (NEXAVAR®, BAY43-9006, Bayer Labs), gefitinib (IRESSA®, AstraZeneca), irinotecan (CAMPTOSAR®, CPT-11, Pfizer), tipifarnib (ZARNESTRA™, Johnson & Johnson), ABRAXANE™ (Cremophor-free), albumin-engineered nanoparticle formulations of paclitaxel (American Pharmaceutical Partners, Schaumberg, II), vandetanib (rINN, ZD6474, ZACTIMA®, AstraZeneca), chloranmbucil, AG1478, AG1571 (SU 5271; Sugen), temsirolimus (TORISEL®, Wyeth), pazopanib (GlaxoSmithKline), canfosfamide (TELCYTA®, Telik), thiotepa and cyclosphosphamide (CYTOXAN®, NEOSAR®); alkyl sulfonates such as busulfan, improsulfan and piposulfan; aziridines such as benzodopa, carboquone, meturedopa, and uredopa; ethylenimines and methylamelamines including altretamine, triethylenemelamine, triethylenephosphoramide, triethylenethiophosphoramide and trimethylomelamine; acetogenins (especially bullatacin and bullatacinone); a camptothecin (including the synthetic analog topotecan); bryostatin; callystatin; CC-1065 (including its adozelesin, carzelesin and bizelesin synthetic analogs); cryptophycins (particularly cryptophycin 1 and cryptophycin 8); dolastatin; duocarmycin (including the synthetic analogs, KW-2189 and CB1-TM1); eleutherobin; pancratistatin; a sarcodictyin; spongistatin; nitrogen mustards such as chlorambucil, chlornaphazine, chlorophosphamide, estramustine, ifosfamide, mechlorethamine, mechlorethamine oxide hydrochloride, melphalan, novembichin, phenesterine, prednimustine, trofosfamide, uracil mustard; nitrosoureas such as carmustine, chlorozotocin, fotemustine, lomustine, nimustine, and ranimnustine; antibiotics such as the enediyne antibiotics (e.g. calicheamicin, calicheamicin gammall, calicheamicin omegall (Angew Chem. Intl. Ed. Engl. (1994) 33:183-186); dynemicin, dynemicin A; bisphosphonates, such as clodronate; an esperamicin; as well as neocarzinostatin chromophore and related chromoprotein enediyne antibiotic chromophores), aclacinomysins, actinomycin, authramycin, azaserine, bleomycins, cactinomycin, carabicin, carminomycin, carzinophilin, chromomycinis, dactinomycin, daunorubicin, detorubicin, 6-diazo-5-oxo-L-norleucine, morpholino-doxorubicin, cyanomorpholino-doxorubicin, 2-pyrrolino-doxorubicin and deoxydoxorubicin), epirubicin, esorubicin, idarubicin, nemorubicin, marcellomycin, mitomycins such as mitomycin C, mycophenolic acid, nogalamycin, olivomycins, peplomycin, porfiromycin, puromycin, quelamycin, rodorubicin, streptonigrin, streptozocin, tubercidin, ubenimex, zinostatin, zorubicin; anti-metabolites such as methotrexate and 5-fluorouracil (5-FU); folic acid analogs such as denopterin, methotrexate, pteropterin, trimetrexate; purine analogs such as fludarabine, 6-mercaptopurine, thiamiprine, thioguanine; pyrimidine analogs such as ancitabine, azacitidine, 6-azauridine, carmofur, cytarabine, dideoxyuridine, doxifluridine, enocitabine, floxuridine; androgens such as calusterone, dromostanolone propionate, epitiostanol, mepitiostane, testolactone; anti-adrenals such as aminoglutethimide, mitotane, trilostane; folic acid replenisher such as frolinic acid; aceglatone; aldophosphamide glycoside; aminolevulinic acid; eniluracil; amsacrine; bestrabucil; bisantrene; edatraxate; defofamine; demecolcine; diaziquone; elfornithine; elliptinium acetate; an epothilone; etoglucid; gallium nitrate; hydroxyurea; lentinan; lonidainine; maytansinoids such as maytansine and ansamitocins; mitoguazone; mitoxantrone; mopidanmol; nitraerine; pentostatin; phenamet; pirarubicin; losoxantrone; podophyllinic acid; 2-ethylhydrazide; procarbazine; PSK® polysaccharide complex (JHS Natural Products, Eugene, Oreg.); razoxane; rhizoxin; sizofiran; spirogermanium; tenuazonic acid; triaziquone; 2,2′,2″-trichlorotriethylamine; trichothecenes (especially T-2 toxin, verracurin A, roridin A and anguidine); urethan; vindesine; dacarbazine; mannomustine; mitobronitol; mitolactol; pipobroman; gacytosine; arabinoside (“Ara-C”); cyclophosphamide; thiotepa; 6-thioguanine; mercaptopurine; methotrexate; platinum analogs such as cisplatin and carboplatin; vinblastine; etoposide (VP-16); ifosfamide; mitoxantrone; vincristine; vinorelbine (NAVELBINE®); novantrone; teniposide; edatrexate; daunomycin; aminopterin; capecitabine (XELODA®, Roche); ibandronate; CPT-11; topoisomerase inhibitor RFS 2000; difluoromethylornithine (DMFO); retinoids such as retinoic acid; and pharmaceutically acceptable salts, acids and derivatives of any of the above. Combinations of agents may be used, such as CHP (doxorubicin, prednisone, cyclophosphamide), or CHOP (doxorubicin, prednisone, cyclophopsphamide, vincristine).

[2036] Also included in the definition of “chemotherapeutic agent” are: (i) anti-hormonal agents that act to regulate or inhibit hormone action on tumors such as anti-estrogens and selective estrogen receptor modulators (SERMs), including, for example, tamoxifen (including NOLVADEX®; tamoxifen citrate), raloxifene, droloxifene, 4-hydroxytamoxifen, trioxifene, keoxifene, LY117018, onapristone, and FARESTON® (toremifine citrate); (ii) aromatase inhibitors that inhibit the enzyme aromatase, which regulates estrogen production in the adrenal glands, such as, for example, 4(5)-imidazoles, aminoglutethimide, MEGASE® (megestrol acetate), AROMASIN® (exemestane; Pfizer), formestanie, fadrozole, RIVISOR® (vorozole), FEMARA® (letrozole; Novartis), and ARIMIDEX® (anastrozole; AstraZeneca); (iii) anti-androgens such as flutamide, nilutamide, bicalutamide, leuprolide, and goserelin; as well as troxacitabine (a 1,3-dioxolane nucleoside cytosine analog); (iv) protein kinase inhibitors such as MEK inhibitors (WO 2007/044515); (v) lipid kinase inhibitors; (vi) antisense oligonucleotides, particularly those which inhibit expression of genes in signaling pathways implicated in aberrant cell proliferation, for example, PKC-alpha, Raf and H-Ras, such as oblimersen (GENASENSE®, Genta Inc.); (vii) ribozymes such as VEGF expression inhibitors (e.g., ANGIOZYME®) and HER2 expression inhibitors; (viii) vaccines such as gene therapy vaccines, for example, ALLOVECTIN®, LEUVECTIN®, and VAXID®; PROLEUKIN® rlL-2; topoisomerase 1 inhibitors such as LURTOTECAN®; ABARELIX® rmRH; (ix) anti-angiogenic agents such as bevacizumab (AVASTIN®, Genentech); and pharmaceutically acceptable salts, acids and derivatives of any of the above.

[2037] Also included in the definition of “chemotherapeutic agent” are therapeutic antibodies such as alemtuzumab (Campath), bevacizumab (AVASTIN®, Genentech); cetuximab (ERBITUX®, Imclone); panitumumab (VECTIBIX®, Amgen), rituximab (RITUXAN®, Genentech/Biogen Idec), ofatumumab (ARZERRA®, GSK), pertuzumab (PERJETA™, OMNITARG™, 2C4, Genentech), trastuzumab (HERCEPTIN®, Genentech), tositumomab (Bexxar, Corixia), MDX-060 (Medarex) and the antibody drug conjugate, gemtuzumab ozogamicin (MYLOTARG®, Wyeth).

[2038] Humanized monoclonal antibodies with therapeutic potential as chemotherapeutic agents in combination with the conjugates of the disclosure include: alemtuzumab, apolizumab, aselizumab, atlizumab, bapineuzumab, bevacizumab, bivatuzumab mertansine, cantuzumab mertansine, cedelizumab, certolizumab pegol, cidfusituzumab, cidtuzumab, daclizumab, eculizumab, efalizumab, epratuzumab, erlizumab, felvizumab, fontolizumab, gemtuzumab ozogamicin, inotuzumab ozogamicin, ipilimumab, labetuzumab, lintuzumab, matuzumab, mepolizumab, motavizumab, motovizumab, natalizumab, nimotuzumab, nolovizumab, numavizumab, ocrelizumab, omalizumab, palivizumab, pascolizumab, pecfusituzumab, pectuzumab, pertuzumab, pexelizumab, ralivizumab, ranibizumab, reslivizumab, reslizumab, resyvizumab, rovelizumab, ruplizumab, sibrotuzumab, siplizumab, sontuzumab, tacatuzumab tetraxetan, tadocizumab, talizumab, tefibazumab, tocilizumab, toralizumab, trastuzumab, tucotuzumab celmoleukin, tucusituzumab, umavizumab, urtoxazumab, and visilizumab.

[2039] Compositions according to the present disclosure, including vaccine compositions, are preferably pharmaceutical compositions. Pharmaceutical compositions according to the present disclosure, and for use in accordance with the present disclosure, may comprise, in addition to the active ingredient, i.e. a conjugate compound, a pharmaceutically acceptable excipient, carrier, buffer, stabiliser or other materials well known to those skilled in the art.

[2040] Such materials should be non-toxic and should not interfere with the efficacy of the active ingredient. The precise nature of the carrier or other material will depend on the route of administration, which may be oral, or by injection, e.g. cutaneous, subcutaneous, or intravenous.

[2041] Pharmaceutical compositions for oral administration may be in tablet, capsule, powder or liquid form. A tablet may comprise a solid carrier or an adjuvant. Liquid pharmaceutical compositions generally comprise a liquid carrier such as water, petroleum, animal or vegetable oils, mineral oil or synthetic oil. Physiological saline solution, dextrose or other saccharide solution or glycols such as ethylene glycol, propylene glycol or polyethylene glycol may be included. A capsule may comprise a solid carrier such a gelatin.

[2042] For intravenous, cutaneous or subcutaneous injection, or injection at the site of affliction, the active ingredient will be in the form of a parenterally acceptable aqueous solution which is pyrogen-free and has suitable pH, isotonicity and stability. Those of relevant skill in the art are well able to prepare suitable solutions using, for example, isotonic vehicles such as Sodium Chloride Injection, Ringer's Injection, Lactated Ringer's Injection. Preservatives, stabilisers, buffers, antioxidants and/or other additives may be included, as required.

[2043] Dosage Regimes

[2044] Dosing Summary

[2045] During assessment of CD25-ADC efficacy, present authors made the surprising observation that the tested CD25-ADC had significant in vivo anti-tumour activity against solid tumours, including tumours composed of CD25-ve neoplastic cells. The present authors made the further unexpected observation of synergistic anti-tumour activity between the tested CD25-ADC and PD-1 antagonists.

[2046] The present authors have therefore developed a treatment regime for the administration of a CD25-ADC, both as a single agent and in combination with PD-1 antagonists. The developed treatment regimes allow for increased clinical benefit and reduced incidence of treatment related adverse events. In particular, the present authors have identified a series of dose levels and intervals that allow for improved clinical utility, including in patient groups previously not suspected of being succeptible to treatment with CD25-ADCs.

[2047] Accordingly, the subject-matter of the present disclosure concerns the use of CD25-ADCs for treating disease, for example, proliferative diseases such as solid tumours (including CD25-ve solid tumours). These dosage regimes described herein are expected to be associated with a range of clinical benefits, including improved efficacy, reduced toxicity and side-effects, and the expansion of the population eligible to be treated to include subjects intolerant of the greater side effects of known dosage regimes and those previously not known to be susceptible to treatment with CD25-ADC.

[2048] In a first dosing aspect the disclosure provides a method of treating a proliferative disease in a subject, said method comprising administering to a subject an effective amount of a CD25-ADC in a Q3W dosage regime.

[2049] Q3W is used herein with its normal meaning of every three weeks. Accordingly, in a Q3W dosage regime a single dose of CD25-ADC is administered on day 1 of a 21-day treatment cycle.

[2050] The dose of CD25-ADC may be up to 300 ug/kg, such as 20 to 300 ug/kg. The dose may be about 20 ug/kg, about 30 ug/kg, about 45 ug/kg, about 60 ug/kg, about 80 ug/kg, about 125 ug/kg, about 150 ug/kg, about 200 ug/kg, about 250 ug/kg, or about 300 ug/kg.

[2051] The CD25-ADC is preferably ADCx25/ADCT-301/Camidanlumab Tesirine as described herein.

[2052] In a second dosing aspect, the method of the first aspect further comprises administering to the subject an effective amount of a PD-1 antagonist in combination with the CD25-ADC.

[2053] The PD1 antagonist may be pembrolizumab, nivolumab, MED10680, PDR001 (spartalizumab), Camrelizumab, AUNP12, Pidilizumab Cemiplimab (REGN-2810), AMP-224, BGB-A317 (Tisleizumab), or BGB-108. Preferably the PD1 antagonist is pembrolizumab.

[2054] The PD1 antagonist may be administered to the subject before, concurrently with, or after the CD25-ADC. Preferably, the CD25-ADC and PD1 antagonist are administered concurrently; that is the CD25-ADC and the PD1 antagonist are administered as part of the same treatment cycle.

[2055] The PD1 antagonist may be administered in a Q3W dosage regime. The dose of the PD1 antagonist may be 200 mg. Typically, the dose of the PD1 antagonist is 200 mg per treatment cycle for an adult subject. In some cases a reduced dose of PD1 antagonist may be administered; for example, a dose of 2 mg/kg (up to 200 mg) per treatment cycle. The reduced dose may be administered to specific patient groups, for example children.

[2056] When administered in combination with PD1 antagonist, the CD25-ADC is preferably administered in a dosage regime consisting of two Q3W treatment cycles. Preferably, the dose of CD25-ADC administered in each of the two treatment cycles is the same. Alternatively, the second dose may be a reduced dose.

[2057] In cases where the subject achieves CR following initial treatment with the CD25-ADC and PD1 antagonist combination, typically no further CD25-ADC is administered to the subject.

[2058] In these cases, PD1 antagonist administration may continue for up to 1 year after the completion of CD25-ADC treatment.

[2059] In cases where the subject achieves SD or PR following initial treatment with the CD25-ADC and PD1 antagonist combination, further CD25-ADC may be administered to the subject. In these cases, PD1 antagonist administration may continue after the initial treatment with the CD25-ADC and PD1 antagonist combination. If the subject has not achieved CR within 3 months after the completion of initial CD25-ADC treatment, further CD25-ADC may be administered to the subject.

[2060] The further CD25-ADC may be administered in a dosage regime consisting of two Q3W treatment cycles. Preferably the dose administered in each of the two treatment cycles is the same. Alternatively, the second dose may be a reduced dose. Typically the further CD25-ADC is administered in combination with PD1 antagonist treatment.

[2061] The subject may be human.

[2062] The subject may have, be suspected of having, or have been diagnosed with a proliferative disease.

[2063] The proliferative disease may be (classical) Hodgkin lymphoma, with mixed cellularity type (Hodgkin-/Reed-Sternbert-Cells: CD25+/−).

[2064] Classical Hodgkins lymphoma includes the subtypes nodular sclerosing, lymphocyte predominant, lymphocyte depleted and mixed cellularity. The Hodgkins lymphoma subtype may not be defined. In certain aspects, the disorder is Hodgkins lymphoma of the nodular sclerosing or mixed cellularity subtype.

[2065] The proliferative disease may be a solid tumour, or characterized by the presence of a neoplasm or neoplastic cells that are all or part of a solid tumour. The neoplasm or neoplastic cells may be CD25-ve.

[2066] “Solid tumor” herein will be understood to include solid haematological cancers such as lymphomas (Hodgkin's lymphoma or non-Hodgkin's lymphoma) which are discussed in more detail herein.

[2067] Solid tumors may be neoplasms, including non-haematological cancers, comprising or composed of CD25+ve neoplastic cells. Solid tumors may be neoplasms, including non-haematological cancers, infiltrated with CD25+ve cells, such as CD25+ve T-cells; such solid tumours may lack expression of CD25 (that is, comprise or be composed of CD25-ve neoplastic cells).

[2068] For example, the solid tumour may be a tumour with high levels of infiltrating T-cells, such as infiltrating regulatory T-cells (Treg; Menetrier-Caux, C., et al., Targ Oncol (2012) 7:15-28; Arce Vargas et al., 2017, Immunity 46, 1-10; Tanaka, A., et al., Cell Res. 2017 January; 27(1):109-118). Accordingly, the solid tumour may be pancreatic cancer, breast cancer, colorectal cancer, gastric and oesophageal cancer, leukemia and lymphoma, melanoma, non-small cell lung cancer, ovarian cancer, hepatocellular carcinoma, renal cell carcinoma, and head and neck cancer.

[2069] The proliferative disease may be relapsed or refractory.

[2070] In a third dosing aspect, the present disclosure provides a method of reducing the toxicity and/or side effects associated with administration of a CD25-ADC or CD25-ADC/PD-1 antagonist combination to a subject, the method comprising administering the CD25-ADC or CD25-ADC/PD-1 antagonist combination in a dosage regime as defined herein.

[2071] In a fourth dosing aspect, the present disclosure provides a method of increasing the treatment efficacy associated with administration of a CD25-ADC or CD25-ADC/PD-1 antagonist combination to a subject, the method comprising administering the CD25-ADC or CD25-ADC/PD-1 antagonist combination in a dosage regime as defined herein.

[2072] In a fifth dosing aspect, the present disclosure provides a method of selecting a subject for treatment by dosage regime as described herein, which selection method comprises selecting for treatment subjects that have either:
[2073] (1) Hodgkins lymphoma;
[2074] (2) a solid tumour comprising or consisting of CD25+ve cells; or
[2075] (3) a solid tumour comprising or composed of CD25−ve neoplastic cells which has high-levels of CD25+ve infiltrating cells, such as CD25+ve T-cells.

[2076] In a sixth dosing aspect the present disclosure provides a packaged pharmaceutical product comprising a CD25-ADC as described herein in combination with a label or insert advising that the CD25-ADC should be administered in a dosage regime as described herein.

[2077] The disclosure also provides a kit comprising:
[2078] a first medicament comprising a CD25-ADC; and
[2079] a package insert or label comprising instructions for administration of the CD25-ADC in dosage regime as described herein;
[2080] optionally wherein the kit further comprises a PD-1 antagonist.

[2081] In a seventh dosing aspect the present disclosure provides a CD25-ADC as defined herein, optionally in combination with a PD-1 antagonist, for use in a method of treatment as described herein.

[2082] In an eighth dosing aspect the present disclosure provides the use of a CD25-ADC as defined herein, optionally in combination with a PD-1 antagonist, in the preparation of a medicament for use in a method of treatment as described herein.

[2083] Dosing Detailed Disclosure

[2084] As described in more detail below, the present authors have developed a treatment regime for the administration of a CD25-ADC, both as a single agent and in combination with PD-1 antagonists.

[2085] The developed treatment regimes allow for increased clinical benefit and reduced incidence of treatment related adverse events. In particular, the present authors have identified a series of dose levels and intervals that allow for improved clinical utility, including in patient groups previously not suspected of being succeptible to treatment with CD25-ADCs.

[2086] In a first aspect the disclosure provides a method of treating a proliferative disease in a subject, said method comprising administering to a subject an effective amount of a CD25-ADC in a Q3W dosage regime.

[2087] CD25-ADC Dosing

[2088] A dosage regime may consist of 2, 3, 4, 5, 6, 7, 8, 9, 10, 11, 12, 13, 14, 15, 16, 17, 18, 19, 20, 21, 22, 23, 24, 25, 26, 27, 28, 29 or 30 treatment cycles. In some cases the dosage regime is ended once the subject attains CR. In some cases the dosage regime is ended when the subject experiences a DLT. In some cases the dosage regime is considered as ended if a dose delay exceeding the length of the preceding treatment cycle is required.

[2089] In some cases the CD25-ADC dose is about 10, 20, 30, 40, 50, 60, 70, 80, 90, 100, 110, 120, 130, 140, 150, 160, 170, 180, 190, 200, 210, 220, 230, 240, 250, 260, 270, 280, 290, or 300 μg/kg. In some cases the CD25-ADC dose is at least 30 μg/kg. In some cases the starting dose is at least 150 μg/kg, such as at least 300 μg/kg.

[2090] In some cases the CD25 dose is about 10, 20, 30, 40, 50, 60, 70, 80, 90, 100, 120, 150, 200, 250, 300, 350, 400, 450, 500, 550, or 600 μg/kg. In some cases the starting dose is 1 to 10 μg/kg, 11 to 20 μg/kg, 21 to 30 μg/kg, 31 to 40 μg/kg, 41 to 50 μg/kg, 51 to 60 μg/kg, 61 to 70 μg/kg, 71 to 80 μg/kg, 81 to 90 μg/kg, 91 to 100 μg/kg, 101 to 120 μg/kg, 121 to 140 μg/kg, 141 to 160 μg/kg, 161 to 180 μg/kg, 181 to 200 μg/kg, 201 to 220 μg/kg, 221 to 240 μg/kg, 241 to 260 μg/kg, 261 to 280 μg/kg, 281 to 300 μg/kg, 301 to 320 μg/kg, 321 to 340 μg/kg, 341 to 360 μg/kg, 361 to 380 μg/kg, 381 to 400 μg/kg, 401 to 420 μg/kg, 421 to 440 μg/kg, 441 to 460 μg/kg, 461 to 480 μg/kg, 481 to 500 μg/kg, 501 to 520 μg/kg, 521 to 540 μg/kg, 541 to 560 μg/kg, 561 to 580 μg/kg, or 581 to 600 μg/kg.

[2091] Preferably the dose of CD25-ADC is about 20 ug/kg, about 30 ug/kg, about 45 ug/kg, about 60 ug/kg, about 80 ug/kg, about 125 ug/kg, about 150 ug/kg, about 200 ug/kg, about 250 ug/kg, or about 300 ug/kg.

[2092] The CD25-ADC may be administered in a Q1W, Q2W, Q3W, Q4W, QSW, or Q6W dosage regime. Preferably the CD25-ADC is administered in a Q3W dosage regime.

[2093] Combinations with PD-1 Antagonists and PD-1 Anagonist Dosing

[2094] The CD25-ADC may be administered in combination with a PD-1 antagonist.

[2095] The PD1 antagonist may be pembrolizumab, nivolumab, MED10680, PDR001 (spartalizumab), Camrelizumab, AUNP12, Pidilizumab Cemiplimab (REGN-2810), AMP-224, BGB-A317 (Tisleizumab), or BGB-108. Preferably the PD1 antagonist is pembrolizumab.

[2096] The PD1 antagonist may be administered to the subject before, concurrently with, or after the CD25-ADC. Preferably, the CD25-ADC and PD1 antagonist are administered concurrently; that is the CD25-ADC and the PD1 antagonist are administered as part of the same treatment cycle.

[2097] In some cases the CD25-ADC and PD1 antagonist are administered on the same day of the treatment cycle, for example on day 1 of the treatment cycle. In some cases the CD25-ADC and PD1 antagonist are not administered on the same day of the treatment cycle; for example, in some cases the CD25-ADC is administered on day 1 of the treatment cycle and PD1 antagonist is administered on day 8 of the treatment cycle.

[2098] The PD1 antagonist may be administered in a Q1W, Q2W, Q3W, Q4W, Q5W, or Q6W dosage regime. Preferably the PD1 antagonist is administered in a Q3W dosage regime.

[2099] In some cases the PD1 antagonist dose is about 10, 20, 30, 40, 50, 60, 70, 80, 90, 100, 110, 120, 130, 140, 150, 160, 170, 180, 190, 200, 210, 220, 230, 240, 250, 260, 270, 280, 290, or 300 mg per treatment cycle. Preferably the dose of the PD1 antagonist is 200 mg pertreatment cycle.

[2100] Typically, the dose of the PD1 antagonist is 200 mg per treatment cycle for an adult subject. In some cases a reduced dose of PD1 antagonist may be administered; for example, a dose of 2 mg/kg (up to 200 mg) per treatment cycle. The reduced dose may be administered to specific patient groups, for example children.

[2101] When administered in combination with PD1 antagonist, the CD25-ADC is preferably administered in a dosage regime consisting of two Q3W treatment cycles. Preferably, the dose of CD25-ADC administered in each of the two treatment cycles is the same. Alternatively, the second dose may be a reduced dose.

[2102] In cases where the subject achieves CR following initial treatment with the CD25-ADC and PD1 antagonist combination, typically no further CD25-ADC is administered to the subject. In these cases, PD1 antagonist administration may continue for up to 1 year after the completion of CD25-ADC treatment.

[2103] In cases where the subject achieves SD or PR following initial treatment with the CD25-ADC and PD1 antagonist combination, further CD25-ADC may be administered to the subject. In these cases, PD1 antagonist administration may continue after the initial treatment with the CD25-ADC and PD1 antagonist combination. If the subject has not achieved CR within 3 months after the completion of initial CD25-ADC treatment, further CD25-ADC may be administered to the subject.

[2104] The further CD25-ADC may be administered in a dosage regime consisting of two Q3W treatment cycles. Preferably the dose administered in each of the two treatment cycles is the same. Alternatively, the second dose may be a reduced dose. Typically the further CD25-ADC is administered in combination with PD1 antagonist treatment.

[2105] Disorders Treated with Disclosed Dosing Regimes

[2106] In one aspect, the present disclosure provides a method of therapy comprising administering an ADC which binds CD25 for use in therapy, wherein the method comprises selecting a subject based on expression of CD25.

[2107] In one aspect, the present disclosure provides a packaged ADC for use in therapy, wherein the packaged ADC is supplied with a label that specifies that the therapy is suitable for use with a subject determined to be suitable for such use. The label may specify that the therapy is suitable for use in a subject has expression of CD25, that is, is CD25+. The label may specify that the ADC is administered in a dosage regime as described herein. The label may specify that the subject has a particular type of cancer, such as Hodgkin Lymphoma (NHL), a CD25+ve solid tumour, or a solid tumour having high levels of CD25+ve infiltrating cells.

[2108] The proliferative disease treated by the methods disclosed herein may be CD25+ve. However as explained herein, in the practice of the disclosure, in at least some of the cells in the target location (typically a neoplasm) the antigen may be absent, or present on the cell surface at an insignificant level. For example in the target neoplasm only e.g. less than 80, 70, 60, 50, 30, 20%, 10% or 5% of the cells may be CD25 positive. Thus, the proliferative disease may be characterised by the presence of a neoplasm comprising both CD25+ve and CD25-ve cells.

[2109] A proliferative disease of particular interest is a solid tumour, including an advanced solid tumour.

[2110] In some cases, for example in some solid tumours, the target neoplasm may be completely or effectively CD25-ve. That is, in some cases the target neoplasm contains no (i.e. 0%) CD25+ve neoplastic cells. In these cases, the neoplasm typically has high levels of CD25+ve infiltrating cells, such as CD25+ve T-cells. That is, the proliferative disease may be characterised by the presence of a neoplasm composed of CD25-ve neoplastic cells, optionally wherein the CD25-ve neoplastic cells are associated with CD25+ve non-neoplastic cells such as CD25+ve T-cells.

[2111] The solid tumour may be a tumour with high levels of infiltrating T-cells, such as infiltrating regulatory T-cells (Treg; Menetrier-Caux, C., et al., Targ Oncol (2012) 7:15-28; Arce Vargas et al., 2017, Immunity 46, 1-10; Tanaka, A., et al., Cell Res. 2017 January; 27(1):109-118).

[2112] Accordingly, the solid tumour may be pancreatic cancer, breast cancer, colorectal cancer, gastric and oesophageal cancer, leukemia and lymphoma, melanoma, non-small cell lung cancer, ovarian cancer, hepatocellular carcinoma, renal cell carcinoma, and head and neck cancer.

[2113] As noted above, in some cases the CD25+ve cell is a tumour infiltrating cell. In some cases the neoplasm or neoplastic cells are, or are present in, a hematological cancer. In some cases the neoplasm or neoplastic cells are, or are present in, a solid tumor. “Solid tumor” herein will be understood to include solid hematological cancers such as lymphomas (Hodgkin's lymphoma or non-Hodgkin's lymphoma) which are discussed in more detail below.

[2114] Another proliferative disorders of particular interest is (classical) Hodgkin lymphomas, with mixed cellularity type (Hodgkin-/Reed-Sternbert-Cells: CD25+/−). Classical Hodgkins lymphoma includes the subtypes nodular sclerosing, lymphocyte predominant, lymphocyte depleted and mixed cellularity. The Hodgkins lymphoma subtype may not be defined. In certain aspects, the subjects have Hodgkins lymphoma of the nodular sclerosing and mixed cellularity subtypes.

[2115] In some cases the neoplasm or neoplastic cells are malignant. In come cases the neoplasm or neoplastic cells are metastatic.

[2116] The disease may be resistant, relapsed or refractory. As used herein, relapsed disease constitutes conditions in which a previously treated tumor which became undetectable by conventional imaging technology again becomes detectable; refractory disease a condition in which the cancer—despite anti-tumor therapy—continues to grow.

[2117] Reduced Toxicity and Improved Efficacy of Discloses Dosing Regimes

[2118] The present disclosure provides a method of reducing the toxicity and/or side effects associated with administration of a CD25-ADC or CD25-ADC/PD-1 antagonist combination to a subject, the method comprising administering the CD25-ADC or CD25-ADC/PD-1 antagonist combination in a dosage regime as defined herein.

[2119] In some cases the reduction in toxicity is measured relative to the treatment regime administered to the subject before commencing treatment with the CD25-ADC as decribed herein. The treatment regime administered to the subject before commencing treatment with the CD25-ADC as described herein may be treatment with a CD25-ADC other than the CD25-ADCs described herein and/or in a dosage regime other than those described herein.

[2120] In some cases the level of toxicity is measured as the incidence of Treatment Emergent Adverse Events (TEAE) occurring after one treatment cycle of CD25-ADC. A treatment-emergent AE (TEAE) is defined as any event not present before exposure to the CD25-ADC or any event already present that worsens in either intensity or frequency after exposure to the CD25-ADC. The incidence of AE with the CD25-ADC may be no more that 95%, such as no more than 90%, no more than 80%, no more than 70%, no more than 60%, no more than 50%, no more than 40%, no more than 30%, no more than 20%, no more than 10%, or no more than 5% of the incidence of AE in the treatment regime administered to the subject before commencing treatment with the CD25-ADC as described herein. Adverse events will be graded according to CTCAE Version 4.0 (v4.03, published Jun. 14, 2010; NIH Publication No. 09-5410).

[2121] For example, if the treatment regime administered to the subject before commencing treatment with the CD25-ADC as described herein when administered to 100 subjects leads to 10 AEs and the CD25-ADC regime leads to 5 AEs, the incidence of AEs with the CD25-ADC regime is 50% of the incidence of AE in the preceding regim

[2122] The above adverse events will be graded according to CTCAE Version 4.0 (v4.03, published Jun. 14, 2010; NIH Publication No. 09-5410).

[2123] The present disclosure also provides a method of increasing the treatment efficacy associated with administration of a CD25-ADC or CD25-ADC/PD-1 antagonist combination to a subject, the method comprising administering the CD25-ADC or CD25-ADC/PD-1 antagonist combination in a dosage regime as defined herein.

[2124] In some cases the increase in efficacy is measured relative to the treatment regime administered to the subject before commencing treatment with the CD25-ADC as described herein. The treatment regime administered to the subject before commencing treatment with the CD25-ADC as described herein may be treatment with a CD25-ADC other than the CD25-ADCs described herein and/or in a dosage regime other than those described herein.

[2125] In some cases the level of efficacy is measured as the proportion of subjects achieving at least a partial response [PR] after one treatment cycle of a dosage regime as described herein (i.e the proportion of subjects achieving either a partial response [PR], or a complete response [CR]). The proportion of subjects achieving at least PR with the dosage regime as described herein may be at least 110%, such as at least 120%, at least 130%, at least 140%, at least 150%, at least 160%, at least 170%, at least 180%, at least 190%, or at least 200%, of the proportion of subjects achieving at least a partial response [PR] with the treatment regime administered to the subject before commencing treatment with the CD25-ADC as decribed herein.

[2126] For Hodgkins lymphoma, assessment of response to treatment with ADC may be based on bone marrow samples (aspirate or biopsy if aspirate unattainable) taken toward the end of each treatment cycle. For example, on day 19±3 days in a 21-day treatment cycle. The subject's response to ADC may be categorised as CR, PR, SD, or PD according to the 2014 Lugano Classification Criteria (using the New “Cheson” Criteria), in which:
[2127] Complete response (CR) is defined as achieving each of the following:
   [2128] Nodal Disease<1.5 cm in LDi
   [2129] Extranodal Disease: Absent
   [2130] Spleen: regress to normal
   [2131] No new lesions
   [2132] Bone marrow: Normal by morphology; if indeterminate, IHC negative
[2133] Partial response (PR) is defined as achieving each of the following:
   [2134] Nodal Disease>=50% decrease from baseline in SPD of all target lesions
   [2135] No increase in non-target
   [2136] Spleen: >50% decrease from baseline in enlarged portion of spleen (value>13 cm)
   [2137] No new lesions
[2138] Stable Disease (SD) is defined as achieving each of the following:
   [2139] Nodal Disease<50% decrease from baseline in SPD of all target lesions
   [2140] No criteria for nodal PD are met
   [2141] No progression in non-target
   [2142] No progression in spleen enlargment
   [2143] No new lesions

[2144] Nodal PD criteria:
[2145] An individual node/lesion must be abnormal with:
   [2146] LDi>1.5 cm AND
   [2147] Increase by >=50% from PPD nadir AND
   [2148] An increase in LDi or SDi from nadir
   [2149] λ2 0.5 cm for lesions≤2 cm
   [2150] ≥1.0 cm for lesions>2 cm

[2151] For solid tumours, assessment of the criteria for objective response level (PR or CR) is preferably according to the criteria set out in RECIST Version 1.1 (see http://www.irrecist.com/recist/; Schwartz, Lawrence H. et al., European journal of cancer 62 (2016): 132-137. PMC. Web. 3 May 2018).

[2152] Selection of Patients for Treatment with Disclosed Dosage Regimes

[2153] In certain cases, the subjects are selected as suitable for treatment with the dosage regimes disclosed herein before the treatment is administered.

[2154] As used herein, subjects who are considered suitable for treatment are those subjects who are expected to benefit from, or respond to, the treatment. Subjects may have, or be suspected of having, or be at risk of having cancer. Subjects may have received a diagnosis of cancer. In particular, subjects may have, or be suspected of having, or be at risk of having, Hodgkin lymphoma, a solid tumour comprising CD25+ve neoplastic cells, or a solid tumour comprising high levels of CD25+ve cells associated with the target neoplastic cells (for example, high levels of infiltrating CD25+ve T-cells). In some cases, subjects may have, or be suspected of having, or be at risk of having, a solid CD25-ve cancer that has tumour associated infiltrating T-cells that express CD25.

[2155] In some cases, subjects are selected on the basis of the amount or pattern of expression of CD25. In some cases, the selection is based on expression of CD25 at the cell surface.

[2156] In some cases, expression of CD25 in a particular tissue of interest is determined. For example, in a sample of lymphoid tissue or tumor tissue. In some cases, systemic expression of CD25 is determined. For example, in a sample of circulating fluid such as blood, plasma, serum or lymph.

[2157] In some cases, the subject is selected as suitable for treatment due to the presence of CD25 expression in a sample. In those cases, subjects without CD25 expression may be considered not suitable for treatment.

[2158] In other cases, the level of CD25 expression is used to select a subject as suitable for treatment. Where the level of expression of CD25 is above a threshold level, the subject is determined to be suitable for treatment.

[2159] In some cases, the presence of CD25+ in cells in the sample indicates that the subject is suitable for treatment with a combination comprising an ADC. In other cases, the amount of CD25 expression must be above a threshold level to indicate that the subject is suitable for treatment. In some cases, the observation that CD25 localisation is altered in the sample as compared to a control indicates that the subject is suitable for treatment.

[2160] In some cases, subjects are selected on the basis they have a neoplasm comprising both CD25+ve and CD25-ve cells. The neoplasm may be composed of CD25-ve neoplastic cells, optionally wherein the CD25-ve neoplastic cells are associated with CD25+ve non-neoplastic cells such as CD25+ve T-cells. The neoplasm or neoplastic cells may be all or part of a solid tumour. The solid tumour may be partially or wholly CD25-ve, and may be infiltrated with CD25+ve cells, such as CD25+ve T-cells.

[2161] In some cases, a subject is indicated as suitable for treatment if cells obtained from lymph node or extra nodal sites react with antibodies against CD25 as determined by IHC.

[2162] In some cases, a patient is determined to be suitable for treatment if at least 5%, 10%, 15%, 20%, 25%, 30%, 35%, 40%, 45%, 50%, 55%, 60%, 65%, 70%, 75%, 80%, 85%, 90% or more of all cells in the sample express CD25. In some cases disclosed herein, a patient is determined to be suitable for treatment if at least at least 5% of the cells in the sample express CD25.

[2163] In some cases, a subject undergoes a neurological examination prioir to treatment with the ADC. Preferably the neurological examination includes tests of strength, sensation, and deep-tendon reflexes.

[2164] In some cases, a subject is determined to be not suitable for treatment with the ADC if they have, or have recently had, a neurologic disorder. Examples of such disorders include poliomyelitis and multiple sclerosis Generally, neurological disorders that are explained by the subject's previous medical history and known not to be related to, or a risk factor for, to treatment with ADC do not render a subject unsuitable for treatment with the ADC. An example of such a disorder is a left-sided weakness known to be a result of a previous cerebral vascular accident, such as a stroke.

[2165] The neurologic disorder, as discussed herein, may be polyradiculopathy (including acute inflammatory demyelinating polyradiculoneuropathy (AIDP)), Guillain-Barre syndrome (GBS), myasthenia gravis, or neurologic disorder that is linked to or is an early indicator of polyradiculitis, GBS, or myasthenia gravis (e.g. ascending (bilateral) sensory loss and/or motor weakness).

[2166] In some cases, a subject undergoes a neurological examination after administration of the ADC. In some cases the results of the neurological examination of a subject after administration of the ADC are compared to the results from before administration of the ADC in order to assess any change in the tested neurological parameters. In some cases, treatment with the ADC is reduced, suspended, or permenantly discontinued if the subject experiences a neurologic toxicity.

[2167] The neurologic toxicity, as discussed herein, may be polyradiculopathy (including acute inflammatory demyelinating polyradiculoneuropathy (AIDP)), Guillain-Barre syndrome (GBS), myasthenia gravis, or neurologic disorder that is linked to or is an early indicator of polyradiculitis, GBS, or myasthenia gravis (e.g. ascending (bilateral) sensory loss and/or motor weakness).

[2168] In some cases, a subject undergoes a neurological examination after each administration of the ADC. In some cases the results of the neurological examination of a subject after each administration of the ADC are compared to the results from before the most recent administration of the ADC in order to assess any change in the tested neurological parameters. In some cases the results of the neurological examination of a subject after each administration of the ADC are compared to the results from before the first administration of the ADC in order to assess any change in the tested neurological parameters.

[2169] In some cases, a subject undergoes a neurological examination if they experience a neurologic toxicity following administration of the ADC.

[2170] In some cases, treatment with the ADC is reduced, suspended, or permenantly discontinued if the subject has a neurological disorder or experiences a neurologic toxicity. For example, if a subject experiences≥grade 1 neurologic toxicity, such as a grade 1 neurologic toxicity that is linked to or is an early indicator of polyradiculitis (e.g. ascending (bilateral) sensory loss and/or motor weakness) treatment with the ADC may be reduced or suspended. In some case, if the subject experiences a ≥grade 2 neurologic toxicity (e.g. grade 2 polyradiculitis or GBS), treatment with the ADC may be permenantly discontinued.

[2171] Adverse events will be graded according to CTCAE Version 4.0 (v4.03, published Jun. 14, 2010; NIH Publication No. 09-5410).

[2172] In some cases, treatment with the ADC is reduced by reducing the dose of ADC that is administered to the subject in each subsequent treatment cycle. In some cases, treatment with the ADC is reduced by increasing the length of each subsequent treatment cycle for example, from a 3 week cycle to a 6 week cycle). In some cases, treatment with the ADC is reduced by reducing the dose of ADC that is administered to the subject in each subsequent treatments cycle and increasing the length of each subsequent treatment.

[2173] In some cases, treatment with the ADC is suspended by stopping treatment with the ADC until the toxicity is resolved. In some cases, treatment with the ADC is resumed after resolution of the toxicity to baseline. The subject may be monitored weekly until the neurologic toxicity is resolved. In some cases the treatment is suspended for up to 3 weeks (21 days).

[2174] For example, in some cases a subject undergoes a neurological examination if they experience≥grade 1 neurologic toxicity, such as a grade 1 neurologic toxicity that is linked to or is an early indicator of polyradiculitis (e.g. ascending (bilateral) sensory loss and/or motor weakness). In some cases, if a subject experiences a ≥grade 1 neurologic toxicity (e.g. grade 1 polyradiculitis or GBS), treatment with the ADC is resumed after resolution of the toxicity to baseline. The subject may be monitored weekly until the neurologic toxicity is resolved.

[2175] In some cases, if a subject experiences a ≥grade 2 neurologic toxicity (e.g. grade 2 polyradiculitis or GBS), treatment with the ADC is permenantly discontinued.

[2176] In some cases, a subject is determined to be not suitable for treatment with the ADC if they have, have recently had, or hisotically had, an infection caused by a pathogen that may be associated with neurologic and/or immune-related disease. Examples of such pathogens include HSV1, HSV2, VZV, EBV, CMV, measles, Influenza A, Zika virus, Chikungunya virus, Mycoplasma pneumonia, Campylobacter jejuni, or enterovirus D68.

[2177] In some cases, treatment with the ADC is reduced, suspended, or permenantly discontinued if the subject experiences has, or aquires, an infection caused by a pathogen that may be associated with neurologic and/or immune-related disease. Examples of such pathogens include HSV1, HSV2, VZV, EBV, CMV, measles, Influenza A, Zika virus, Chikungunya virus, Mycoplasma pneumonia, Campylobacter jejuni, or enterovirus D68. In some cases, treatment with the ADC is suspended until at least 4 weeks after symptoms of the infection are resolved.

[2178] Examples of immune-relatyed diseases include rheumatoid arthritis, systemic progressive sclerosis [scleroderma], systemic lupus erythematosus, Sj6gren's syndrome, autoimmune vasculitis [e.g., Wegener's granulomatosis].

[2179] In some cases, treatment with the ADC is reduced, suspended, or permenantly discontinued if the subject experiences any ≥grade 1 autoimmune toxicities (e.g. endocrinopathies,).

[2180] Dosinq Subject Status

[2181] The subject may be an animal, mammal, a placental mammal, a marsupial (e.g., kangaroo, wombat), a monotreme (e.g., duckbilled platypus), a rodent (e.g., a guinea pig, a hamster, a rat, a mouse), murine (e.g., a mouse), a lagomorph (e.g., a rabbit), avian (e.g., a bird), canine (e.g., a dog), feline (e.g., a cat), equine (e.g., a horse), porcine (e.g., a pig), ovine (e.g., a sheep), bovine (e.g., a cow), a primate, simian (e.g., a monkey or ape), a monkey (e.g., marmoset, baboon), an ape (e.g., gorilla, chimpanzee, orangutang, gibbon), or a human.

[2182] Furthermore, the subject may be any of its forms of development, for example, a foetus. In one preferred embodiment, the subject is a human. The terms “subject”, “patient” and “individual” are used interchangeably herein.

[2183] In some cases disclosed herein, a subject has, or is suspected as having, or has been identified as being at risk of, cancer. In some cases disclosed herein, the subject has already received a diagnosis of cancer. The subject may have received a diagnosis of (classical) Hodgkins lymphoma (including nodular sclerosing, lymphocyte predominant, lymphocyte, or mixed cellularity type, or where the type is unspecified) and/or a solid tumour.

[2184] In some cases disclosed herein, a subject has, or is suspected as having, has been identified as being at risk of, or has received a diagnosis of a solid cancer containing CD25+ expressing infiltrating T-cells.

[2185] In some cases disclosed herein, a subject has, or is suspected as having, has been identified as being at risk of, or has received a diagnosis of, a proliferative disease characterised by the presence of a neoplasm comprising both CD25+ve and CD25-ve cells. The neoplasm may be composed of CD25-ve neoplastic cells, optionally wherein the CD25-ve neoplastic cells are associated with CD25+ve non-neoplastic cells such as CD25+ve T-cells. The neoplasm or neoplastic cells may be all or part of a solid tumour. The solid tumor may be a neoplasm, including a non-haematological cancer, comprising or composed of CD25+ve neoplastic cells. The solid tumor may be a neoplasm, including a non-haematological cancer, infiltrated with CD25+ve cells, such as CD25+ve T-cells; such solid tumours may lack expression of CD25 (that is, comprise or be composed of CD25-ve neoplastic cells).

[2186] In some cases disclosed herein, a subject has, or is suspected as having, has been identified as being at risk of, or has received a diagnosis of a solid tumour with high levels of infiltrating T-cells, such as infiltrating regulatory T-cells (Treg; Menetrier-Caux, C., et al., Targ Oncol (2012) 7:15-28; Arce Vargas et al., 2017, Immunity 46, 1-10; Tanaka, A., et al., Cell Res. 2017 January; 27(1):109-118). The some or all of the neoplastic cells in the tumour may be CD25-ve. The solid tumour may be pancreatic cancer, breast cancer, colorectal cancer, gastric and oesophageal cancer, leukemia and lymphoma, melanoma, non-small cell lung cancer, ovarian cancer, hepatocellular carcinoma, renal cell carcinoma, and head and neck cancer.

[2187] The Subject may be undergoing, or have undergone, a therapeutic treatment for that cancer. The subject may, or may not, have previously received ADCX25. In some cases the cancer is lymphoma, including Hodgkins or non-Hodgkins lymphoma.

[2188] Some Dosing Embodiments

[2189] The disclosure provides a method of treating a proliferative disease in a subject, said method administering to a subject an effective amount of a CD25-ADC in a Q3W dosage regime.

[2190] The dose of CD25-ADC may be about 20 ug/kg, about 30 ug/kg, about 45 ug/kg, about 60 ug/kg, about 80 ug/kg, about 100 ug/kg, about 125 ug/kg, about 150 ug/kg, about 200 ug/kg, about 250 ug/kg, or about 300 ug/kg.

[2191] The CD25-ADC is preferably ADCx25/ADCT-301/Camidanlumab Tesirine as described herein.

[2192] The disclosure further provides a method of treating a proliferative disease in a subject, said method administering to a subject an effective amount of a CD25-ADC in a Q3W dosage regime, an effective amount of a PD-1 antagonist is administered in combination with the CD25-ADC.

[2193] Preferably, the CD25-ADC and PD1 antagonist are administered concurrently; that is the CD25-ADC and the PD1 antagonist are administered as part of the same treatment cycle.

[2194] Preferably the PD1 antagonist is administered n a Q3W dosage regime. Preferably the dose administered is 200 mg per treatment cycle.

[2195] Preferably the PD1 antagonist is pembrolizumab.

[2196] When administered in combination with PD1 antagonist, the CD25-ADC is preferably administered in a dosage regime consisting of two, identical Q3W treatment cycles.

[2197] In cases where the subject achieves CR following initial treatment with the CD25-ADC and PD1 antagonist combination, preferably no further CD25-ADC is administered to the subject.

[2198] In cases where the subject achieves SD or PR following initial treatment with the CD25-ADC and PD1 antagonist combination, preferably PD1 antagonist administration continues after the initial treatment with the CD25-ADC and PD1 antagonist combination.

[2199] If the subject has not achieved CR within 3 months after the completion of initial CD25-ADC treatment, further CD25-ADC is preferably administered to the subject. The further CD25-ADC is preferably administered in a dosage regime consisting of two, equal Q3W treatment cycles. Preferably the further CD25-ADC is administered in combination with PD1 antagonist treatment.

[2200] The subject may be human.

[2201] The subject may have, be suspected of having, or have been diagnosed with a proliferative disease.

[2202] The proliferative disease may be (classical) Hodgkin lymphoma, with mixed cellularity type (Hodgkin-/Reed-Sternbert-Cells: CD25+/−).

[2203] Classical Hodgkins lymphoma includes the subtypes nodular sclerosing, lymphocyte predominant, lymphocyte depleted and mixed cellularity. The Hodgkins lymphoma subtype may not be defined. In certain aspects, the disorder is Hodgkins lymphoma of the nodular sclerosing or mixed cellularity subtype.

[2204] The proliferative disease may be a solid tumour, or characterized by the presence of a neoplasm or neoplastic cells that are all or part of a solid tumour. The neoplasm or neoplastic cells may be CD25-ve.

[2205] “Solid tumor” herein will be understood to include solid haematological cancers such as lymphomas (Hodgkin's lymphoma or non-Hodgkin's lymphoma) which are discussed in more detail herein.

[2206] Solid tumors may be neoplasms, including non-haematological cancers, comprising or composed of CD25+ve neoplastic cells. Solid tumors may be neoplasms, including non-haematological cancers, infiltrated with CD25+ve cells, such as CD25+ve T-cells; such solid tumours may lack expression of CD25 (that is, comprise or be composed of CD25-ve neoplastic cells).

[2207] For example, the solid tumour may be a tumour with high levels of infiltrating T-cells, such as infiltrating regulatory T-cells (Treg; Menetrier-Caux, C., et al., Targ Oncol (2012) 7:15-28; Arce Vargas et al., 2017, Immunity 46, 1-10; Tanaka, A., et al., Cell Res. 2017 January; 27(1):109-118). Accordingly, the solid tumour may be pancreatic cancer, breast cancer, colorectal cancer, gastric and oesophageal cancer, leukemia and lymphoma, melanoma, non-small cell lung cancer, ovarian cancer, hepatocellular carcinoma, renal cell carcinoma, and head and neck cancer.

[2208] The proliferative disease may be relapsed or refractory.

[2209] In a third aspect, the present disclosure provides a method of reducing the toxicity and/or side effects associated with administration of a CD25-ADC or CD25-ADC/PD-1 antagonist combination to a subject, the method comprising administering the CD25-ADC or CD25-ADC/PD-1 antagonist combination in a dosage regime as defined herein.

[2210] In a fourth aspect, the present disclosure provides a method of increasing the treatment efficacy associated with administration of a CD25-ADC or CD25-ADC/PD-1 antagonist combination to a subject, the method comprising administering the CD25-ADC or CD25-ADC/PD-1 antagonist combination in a dosage regime as defined herein.

[2211] In a fifth aspect, the present disclosure provides a method of selecting a subject for treatment by dosage regime as described herein, which selection method comprises selecting for treatment subjects that have either:
[2212] (1) Hodgkins lymphoma;
[2213] (2) a solid tumour comprising or consisting of CD25+ve cells; or
[2214] (3) a solid tumour comprising or composed of CD25-ve neoplastic cells which has high-levels of CD25+ve infiltrating cells, such as CD25+ve T-cells.

[2215] In a sixth aspect the present disclosure provides a packaged pharmaceutical product comprising a CD25-ADC as described herein in combination with a label or insert advising that the CD25-ADC should be administered in a dosage regime as described herein.

[2216] The disclosure also provides a kit comprising:
[2217] a first medicament comprising a CD25-ADC; and
[2218] a package insert or label comprising instructions for administration of the CD25-ADC in dosage regime as described herein;
[2219] optionally wherein the kit further comprises a PD-1 antagonist.

[2220] In a seventh aspect the present disclosure provides a CD25-ADC as defined herein, optionally in combination with a PD-1 antagonist, for use in a method of treatment as described herein.

[2221] In an eighth aspect the present disclosure provides the use of a CD25-ADC as defined herein, optionally in combination with a PD-1 antagonist, in the preparation of a medicament for use in a method of treatment as described herein.

[2222] ministering to a subject a CD25-ADC, wherein the CD25-ADC is administered to the subject in a tapered and/or elongated dosage regimes.

[2223] In some cases the dosage regime comprises dosing about 120 μg/kg every 3 weeks for 2 cycles, then continuing treatment with the third and subsequent cycles at a reduced dose of about 60 μg/kg every 6 weeks, beginning 6 weeks after cycle 2 administration. Preferably only subjects who have attained at least SD after the second cycle will continue with the reduced dose and increased cycle length.

[2224] In some cases the dosage regime comprises dosing about 150 μg/kg every 3 weeks for 2 cycles, then continuing treatment with the third and subsequent cycles at a reduced dose of about 60 μg/kg every 6 weeks, beginning 6 weeks after cycle 2 administration. Preferably only subjects who have attained at least SD after the second cycle will continue with the reduced dose and increased cycle length.

[2225] In some cases the dosage regime comprises dosing about 200 μg/kg every 6 weeks for 2 cycles, then continuing treatment with the third and subsequent cycles at a reduced dose of about 60 μg/kg every 6 weeks, beginning 6 weeks after cycle 2 administration. Preferably only subjects who have attained at least SD after the second cycle will continue with the reduced dose.

[2226] In some cases the dosage regime comprises dosing about 200 μg/kg every 6 weeks for 1 cycle, then continuing treatment with the second and subsequent cycles at a reduced dose of about 60 μg/kg every 6 weeks, beginning 6 weeks after cycle 1 administration. Preferably only subjects who have attained at least SD after the first cycle will continue with the reduced dose.

[2227] In some cases the dosage regime comprises dosing about 45 μg/kg every 3 weeks for up to 4 treatment cycles, then continuing treatment every 3 weeks at a reduced dose of about 30 μg/kg or about 20 μg/kg (such as 20 to 30 μg/kg). In some cases, the starting dose of 45 μg/kg is administered for only 1 treatment cycle before the dose is reduced. In some cases, the starting dose of 45 μg/kg is administered for only 2 treatment cycles before the dose is reduced. In some cases, the starting dose of 45 μg/kg is administered for only 3 treatment cycles before the dose is reduced. In some cases, the starting dose of 45 μg/kg is administered for 4 treatment cycles before the dose is reduced.

[2228] Preferably the CD25-ADC is administered as single dose on Day 1 of each cycle, unless otherwise specified.

[2229] Preferably the CD25-ADC is ADCx25/ADCT-301/Camidanlumab Tesirine as described herein.

[2230] Preferably the proliferative disease is lymphoma, such as Non Hodgkin Lymphoma. The disease may be relapsed or refractory.

[2231] Administration of ADCx25 in combination with SGN-CD33A for the treatment of AML is envisaged. Administration of ADCx25 in combination with inotuzumab ozogamicin for the treatment of ALL is envisaged.

[2232] Preferably the subject is human.

[2233] Preferably the CD19-ADC is administered in combination with dexamethasone, as described herein.

[2234] Statements of Dosing Disclosure

[2235] 1d. A method of treating a proliferative disease in a subject, said method comprising administering to a subject a CD25-ADC,
[2236] wherein the CD25-ADC comprises a conjugate of formula L—(D^{L})ₚ, where D^{L} is of formula I or II:

[chemical structure]

[2237] wherein:

[2238] L is an antibody (Ab) which is an antibody that binds to CD25;
[2239] when there is a double bond present between C2′ and C3′, R¹² is selected from the group consisting of:
   (ia) C₅₋₁₀ aryl group, optionally substituted by one or more substituents selected from the group comprising: halo, nitro, cyano, ether, carboxy, ester, C₁₋₇ alkyl, C₃₋₇ heterocyclyl and bis-oxy-C₁₋₃ alkylene;
   (ib) C₁₋₅ saturated aliphatic alkyl;
   (ic) C₃₋₆ saturated cycloalkyl;
   (id)

[chemical structure]

wherein each of R²¹, R²² and R²³ are independently selected from H, C₁₋₃ saturated alkyl, C₂₋₃ alkenyl, C₂₋₃ alkynyl and cyclopropyl, where the total number of carbon atoms in the R¹² group is no more than 5;
(ie)

[chemical structure]

wherein one of R^{25a} and R^{25b} is H and the other is selected from: phenyl, which phenyl is optionally substituted by a group selected from halo, methyl, methoxy; pyridyl; and thiopheny rrN1
(if)

[chemical structure]

where R²⁴ is selected from: H; C₁₋₃ saturated alkyl; C₂₋₃ alkenyl; C₂₋₃ alkynyl; cyclopropyl; phenyl, which phenyl is optionally substituted by a group selected from halo, methyl, methoxy; pyridyl; and thiophenyl;
when there is a single bond present between C2′ and C3′,

### R¹² is

[chemical structure]

where R^{26a} and R^{26b} are independently selected from H, F, C₁₋₄ saturated alkyl, C₂₋₃ alkenyl, which alkyl and alkenyl groups are optionally substituted by a group selected from C₁₋₄ alkyl amido and C₁₋₄ alkyl ester; or, when one of R^{26a} and R^{26b} is H, the other is selected from nitrile and a C₁₋₄ alkyl ester;
R⁶ and R⁹ are independently selected from H, R, OH, OR, SH, SR, NH₂, NHR, NRR′, nitro, Me₃Sn and halo;
where R and R′ are independently selected from optionally substituted C₁₋₁₂ alkyl, C₃₋₂₀ heterocyclyl and C₅₋₂₀ aryl groups;
R⁷ is selected from H, R, OH, OR, SH, SR, NH₂, NHR, NHRR′, nitro, Me₃Sn and halo;
R″ is a C₃₋₁₂ alkylene group, which chain may be interrupted by one or more heteroatoms, e.g. O, S, NR^{N2} (where R^{N2} is H or C₁₋₄ alkyl), and/or aromatic rings, e.g. benzene or pyridine;
Y and Y′ are selected from O, S, or NH;
R^{6′}, R^{7′}, R^{9′} are selected from the same groups as R⁶, R⁷ and R⁹ respectively;

### [Formula I]

[2241] R^{L1′} is a linker for connection to the antibody (Ab);
R^{11a} is selected from OH, OR^{A}, where R^{A} is C₁₋₄ alkyl, and SOzM, where z is 2 or 3 and M is a monovalent pharmaceutically acceptable cation;
R²⁰ and R²¹ either together form a double bond between the nitrogen and carbon atoms to which they are bound or;
R²⁰ is selected from H and R^{C}, where R^{C} is a capping group;
R²¹ is selected from OH, OR^{A} and SO_{z}M;
when there is a double bond present between C2 and C3, R² is selected from the group consisting of:
(ia) C₅₋₁₀ aryl group, optionally substituted by one or more substituents selected from the group comprising: halo, nitro, cyano, ether, carboxy, ester, C₁₋₇ alkyl, C₃₋₇ heterocyclyl and bis-oxy-C₁₋₃ alkylene;
(ib) C₁₋₅ saturated aliphatic alkyl;
(ic) C₃₋₆ saturated cycloalkyl;
(id)

[chemical structure]

wherein each of R¹¹, R¹² and R¹³ are independently selected from H, C₁₋₃ saturated alkyl, C₂₋₃ alkenyl, C₂₋₃ alkynyl and cyclopropyl, where the total number of carbon atoms in the R² group is no more than 5;
(ie)

[chemical structure]

wherein one of R^{15a} and R^{15b} is H and the other is selected from: phenyl, which phenyl is optionally substituted by a group selected from halo, methyl, methoxy; pyridyl; and thiophenyl; and
(if)

[chemical structure]

where R¹⁴ is selected from: H; C₁₋₃ saturated alkyl; C₂₋₃ alkenyl; C₂₋₃ alkynyl; cyclopropyl; phenyl, which phenyl is optionally substituted by a group selected from halo, methyl, methoxy; pyridyl; and thiophenyl;
when there is a single bond present between C2 and C3,

### R² is

[chemical structure]

where R^{16a} and R^{16b} are independently selected from H, F, C₁₋₄ saturated alkyl, C₂₋₃ alkenyl, which alkyl and alkenyl groups are optionally substituted by a group selected from C₁₋₄ alkyl amido and C₁₋₄ alkyl ester; or, when one of R^{16a} and R^{16b} is H, the other is selected from nitrile and a C₁₋₄ alkyl ester;

### [Formula II]

[2243] R²² is of formula Illa, formula Illb or formula Illc:
(a)

[chemical structure]

where A is a C₅₋₇ aryl group, and either
(i) Q¹ is a single bond, and Q² is selected from a single bond and —Z—(CH₂)ₙ—, where Z is selected from a single bond, O, S and NH and n is from 1 to 3; or
(ii) Q¹ is —CH═CH—, and Q² is a single bond;
(b)

[chemical structure]

where;
R^{C1}, R^{C2} and R^{C3} are independently selected from H and unsubstituted C₁₋₂ alkyl;
(c)

[chemical structure]

where Q is selected from O—R^{L2′}, S—R^{L2′} and NR^{N}—R^{L2′}, and RN is selected from H, methyl and ethyl
X is selected from the group comprising: O—R^{L2′}, S—R^{C}, CO₂—R^{L2′}, O—R^{L2′}, NH—C(═O)—R^{L2′}, NHNH—R^{L2′}, CONHNH—R^{L2′},

[chemical structure]

NR^{N}R^{L2′}, wherein R^{N} is selected from the group comprising H and C₁₋₄ alkyl;
R^{L2′} is a linker for connection to the antibody (Ab);
R¹⁰ and R¹¹ either together form a double bond between the nitrogen and carbon atoms to which they are bound or;
R¹⁰ is H and R¹¹ is selected from OH, OR^{A} and SO_{z}M;
R³⁰ and R³¹ either together form a double bond between the nitrogen and carbon atoms to which they are bound or;
R³⁰ is H and R³¹ is selected from OH, OR^{A} and SOzM.
2d. The method according to statement 1d, wherein the CD25-ADC is administered to the subject Q1W, Q2W, Q3W, Q4W, Q5W, or Q6W dosage regime.
3d. The method according to statement 2d, wherein the CD25-ADC is administered to the subject Q3W dosage regime.
4d. The method according to any one of statements 1d to 3d wherein the CD25-ADC has the chemical structure:

[chemical structure]

where the Ab is a CD25 antibody, and the DAR is between 1 and 8.
5d. The method according to any one of statements 1d to 4d wherein Ab comprises:

[2244] a VH domain comprising a VH CDR1 with the amino acid sequence of SEQ ID NO.3, a VH CDR2 with the amino acid sequence of SEQ ID NO.4, and a VH CDR3 with the amino acid sequence of SEQ ID NO.5; and, optionally,

[2245] a VL domain comprising a VL CDR1 with the amino acid sequence of SEQ ID NO.6, a VL CDR2 with the amino acid sequence of SEQ ID NO.7, and a VL CDR3 with the amino acid sequence of SEQ ID NO.8.

6d. The method according to any one of statements 1d to 5d wherein Ab comprises a VH domain having the sequence of SEQ ID NO. 1 and a VL domain having the sequence of SEQ ID NO. 2.
7d. The method according to any one of statements 1d to 6d wherein the CD25-ADC is ADCx25, ADCT-301, or Camidanlumab Tesirine.
8d. The method according to any preceding statement wherein the dose of CD25-ADC is at least about 10, 20, 30, 40, 50, 60, 70, 80, 90, 100, 110, 120, 130, 140, 150, 160, 170, 180, 190, 200, 210, 220, 230, 240, 250, 260, 270, 280, 290, or 300 μg/kg.
9d. The method according to any preceding statement wherein the CD25-ADC dose is about 10, 20, 30, 40, 50, 60, 70, 80, 90, 100, 110, 120, 130, 140, 150, 160, 170, 180, 190, 200, 210, 220, 230, 240, 250, 260, 270, 280, 290, 300, 350, 400, 450, 500, 550, or 600 μg/kg.
10d. The method according to any preceding statement wherein the CD25-ADC dose is 1 to 10 μg/kg, 11 to 20 μg/kg, 21 to 30 μg/kg, 31 to 40 μg/kg, 41 to 50 μg/kg, 51 to 60 μg/kg, 61 to 70 μg/kg, 71 to 80 μg/kg, 81 to 90 μg/kg, 91 to 100 μg/kg, 101 to 120 μg/kg, 121 to 140 μg/kg, 141 to 160 μg/kg, 161 to 180 μg/kg, 181 to 200 μg/kg, 201 to 220 μg/kg, 221 to 240 μg/kg, 241 to 260 μg/kg, 261 to 280 μg/kg, 281 to 300 μg/kg, 301 to 320 μg/kg, 321 to 340 μg/kg, 341 to 360 μg/kg, 361 to 380 μg/kg, 381 to 400 μg/kg, 401 to 420 μg/kg, 421 to 440 μg/kg, 441 to 460 μg/kg, 461 to 480 μg/kg, 481 to 500 μg/kg, 501 to 520 μg/kg, 521 to 540 μg/kg, 541 to 560 μg/kg, 561 to 580 μg/kg, or 581 to 600 μg/kg.
11d. The method according to any preceding statement wherein the CD25-ADC dose is about 20 μg/kg.
12d. The method according to any preceding statement wherein the CD25-ADC dose is about 30 μg/kg.
13d. The method according to any preceding statement wherein the CD25-ADC dose is about 45 μg/kg.
14d. The method according to any preceding statement wherein the CD25-ADC dose is about 60 μg/kg.
15d. The method according to any preceding statement wherein the CD25-ADC dose is about 80 μg/kg.
16d. The method according to any preceding statement wherein the CD25-ADC dose is about 125 μg/kg.
17d. The method according to any preceding statement wherein the CD25-ADC dose is about 150 μg/kg.
18d. The method according to any preceding statement wherein the CD25-ADC dose is about 200 μg/kg.
19d. The method according to any preceding statement wherein the CD25-ADC dose is about 250 μg/kg.
20d. The method according to any preceding statement wherein the CD25-ADC dose is about 300 μg/kg.
21d. The method according to any preceding statement further comprising administering a PD1 antagonist in combination with the CD25-ADC.
22d. The method according to statement 21d wherein the PD1 antagonist is pembrolizumab, nivolumab, MED10680, PDR001 (spartalizumab), Camrelizumab, AUNP12, Pidilizumab Cemiplimab (REGN-2810), AMP-224, BGB-A317 (Tisleizumab), or BGB-108.
23d. The method according to statement 21d wherein the PD1 antagonist is pembrolizumab.
24d. The method according to any one of statements 21d to 23d, wherein the PD1 antagonist is administered concurrently with the CD25-ADC.
25d. The method according to statement 24d wherein the PD1 antagonist is administered on the same day as the CD25-ADC.
26d. The method according to any one of statements 21d to 25d, wherein the PD1 antagonist is administered in a Q3W dosage regime.
27d. The method according to any one of statements 21d to 26d, wherein the dose of PD1 antagonist is 200 mg per treatment cycle.
28d. The method according to any one of statements 21d to 27d, wherein the CD25-ADC is administered to the subject for two, 3-week treatment cycles.
29d. The method according to statement 28d, wherein the dose of CD25-ADC administered in each of the two, 3-week treatment cycles is the same.
30d. The method according to any one of statements 21d to 29d, wherein the administration of PD1 antagonist continues after the completion of CD25-ADC treatment.
31d. The method according to any one of statements 28d to 30d, wherein the CD25-ADC is administered to the subject for a further two, 3-week treatment cycles.
32d. The method according to statement 31d, wherein the further two CD25-ADC treatment cycles are administered If the subject has not achieved CR within 3 months after the completion of initial two, 3-week treatment cycles.
33d. The method according to any preceding statement wherein the subject has been diagnosed as having the proliferative disease prior to the start of treatment with the CD25-ADC.
34d. The method according to any preceding statement, wherein the proliferative disease is Hodgkin Lymphoma.
35d. The method according to any preceding statement, wherein the proliferative disease is a solid tumour.
36d. The method according to statement 35d, wherein solid tumour is pancreatic cancer, breast cancer, colorectal cancer, gastric and oesophageal cancer, leukemia and lymphoma, melanoma, non-small cell lung cancer, ovarian cancer, hepatocellular carcinoma, renal cell carcinoma, or head and neck cancer.
37d. The method according to any preceding statement wherein the proliferative disease is characterised by the presence of a neoplasm comprising CD25+ve neoplastic cells
38d. The method according to statement 3d7, wherein the neoplasm also comprises CD25-ve neoplastic cells.
39d. The method according to any one of statements 1 to 36d, wherein the proliferative disease is characterised by the presence of a neoplasm composed of CD25-ve neoplastic cells.
40d. The method according to any one of statements 33d to 35d, wherein the CD25+ve and/or the CD25-ve neoplastic cells are associated with CD25+ve non-neoplastic cells.
41d. The method according to statement 40d, wherein the CD25+ve non-neoplastic cells are CD25+ve T-cells, such as CD25+ve regulatory T-cells.
42d. The method according to any preceding statement wherein the method comprises the step of selecting a subject for treatment based on expression of CD25 on neoplastic cells or cells associated with neoplastic cells.
43d. The method according to statement 42d, wherein a subject is selected if at least 5% of neoplasm cells express CD25.
44d. The method according to any preceding statement wherein the proliferative disease is resistant, relapsed or refractory.
45d. The method according to any preceding statement wherein the subject is human.
46d. The method according to any preceding statement wherein the CD25-ADC is administered intravenously.
47d. The method according to any preceding statement, wherein the CD25-ADC is administered in combination with a steroid.
48d. The method according to statement 47d, wherein a first dose of steroid is administered on the same day as the ADC.
49d. The method according to statement 48d, wherein the first dose of steroid is administered at least 2 hours before the ADC.
50d. The method according to either one of statements 47d or 48d, wherein a second dose of steroid is administered the day after the ADC.
51d. The method according to statement 47d, wherein a first dose of steroid is administered the day before the ADC.
52d. The method according to statement 51d, wherein a second dose of steroid is administered on the same day as the ADC.
53d. The method according to statement 52d, wherein the second dose of steroid is administered at least 2 hours before the ADC.
54d. The method according to either one of statements 52d or 53d, wherein a third dose of steroid is administered the day after the ADC.
55d. The method according to any one of statements 47d to 54d, wherein the steroid or steroid doses are administered only in conjunction with the first administration of ADC in each treatment cycle.
56d. The method according to any one of statements 47d to 55d, wherein the steroid is administered orally.
57d. The method according to any one of statements 47d to 56d, wherein each dose of steroid is 8 mg.
58d. The method according to any one of statements 47d to 57d, wherein each dose of steroid is 16 mg.
59d. The method according to any one of statements 47d to 58d, wherein each dose of steroid is administered as two equal, partial doses.
60d. The method according to any one of statements 47d to 59d, wherein each partial dose is 4 mg.
61d. The method according to any one of statements 47d to 60d, wherein each partial dose is 8 mg.
62d. The method according to any one of statements 45d to 50d, wherein the steroid is dexamethasone.
63d. The method according to statement 47d, wherein 4 mg or 8 mg dexamethasone is administered orally twice daily: (i) the day before ADC administration on week 1, day 1 of the treatment cycle, (ii) the day of ADC administration on week 1, day 1 of the treatment cycle, and (iii) the day after ADC administration on week 1, day 1 of the treatment cycle.
64d. The method according to statement 47d, wherein 4 mg or 8 mg dexamethasone is administered orally twice daily: (i) the day of ADC administration on week 1, day 1 of the treatment cycle, and (ii) the day after ADC administration on week 1, day 1 of the treatment cycle.
65d. The method according to either one of statements 63d and 64d, wherein the dexamethasone administered on the same day as the ADC is administered at least two hours before the ADC.
66d. The method according to any one of statements 63d to 65d, wherein the dexamethasone is administered only in conjunction with the first administration of ADC in each treatment cycle.
67d. The method according to any preceding statement, wherein the subject undergoes a neurological examination prior to treatment with the ADC.
68d. The method according to any preceding statement, wherein the subject undergoes a neurological examination after administration of the ADC.
69d. The method according to any preceding statement, wherein the subject undergoes a neurological examination after each administration of the ADC.
70d. The method according to any preceding statement, wherein the subject undergoes a neurological examination if they experience a neurologic toxicity following administration of the ADC.
71d. The method according to any one of statements 67d to 70d, wherein the neurological examination includes tests of strength, sensation, and/or deep-tendon reflexes.
72d. The method according to any preceding statement, wherein treatment with the ADC is reduced, suspended, or permenantly discontinued if the subject has a neurological disorder or experiences a neurologic toxicity.
73d. The method according to any preceding statement, wherein treatment with the ADC is reduced or suspended if the subject experiences a grade 1 neurologic toxicity.
74d. The method according to any preceding statement, wherein treatment with the ADC is permenantly discontinued if the subject experiences a grade 2 neurologic toxicity.
75d. The method according to any one of statements 72d to 74d, wherein treatment with the ADC is reduced by reducing the dose of ADC that is administered to the subject in each subsequent treatment cycle, and/or by increasing the length of each subsequent treatment cycle.
76d. A method of selecting a subject for treatment by a method according to any one of statements 1d to 75d, which method comprises determining if the subject has, or recently had, a neurologic disorder, wherein the subject is determined to be not suitable for treatment with the ADC if they have, or have recently had, a neurologic disorder.
77d. A method of selecting a subject for treatment by a method according to any one of statements 1d to 75d, which method comprises determining if the subject has, or recently had, an infection caused by a pathogen that may be associated with neurologic and/or immune-related disease; wherein the subject is determined to be not suitable for treatment with the ADC if they have, or have recently had, such an infection and/or immune-related disease.
78d. The method according to any one of statements 70d to 77d, wherein the neurologic disorder or neurological toxicity is polyradiculopathy, acute inflammatory demyelinating (AIDP), Guillain-Barre syndrome (GBS), myasthenia gravis, or a neurologic disorder that is linked to or is an early indicator of polyradiculitis, GBS, or myasthenia gravis, such as ascending sensory loss and/or motor weakness.
79d. The method according to any one of statements 70d to 77d, wherein the neurologic disorder or neurological toxicity is Guillain-Barre syndrome (GBS).
80d. A method of reducing the toxicity and/or side effects associated with administration of a CD25-ADC to a subject, the method comprising administering the CD25-ADC according to the method of any preceding statement.
81d. A method of increasing the treatment efficacy associated with administration of a CD25-ADC to a subject, the method comprising administering the CD25-ADC according to the method of any preceding statement.
82d. A method of selecting a subject for treatment by a method according to any one of statements 1d to 79d, which method comprises selecting for treatment subjects that express CD25 in a tissue of interest.
83d. The method according to statement 82d wherein subjects are selected if at least 5% of cells in a sample of the tissue of interest express CD25.
84d. The method according to either one of statements 82d or 83d wherein the tissue of interest is lymphoid tissue or tumour tissue.
85d. A packaged pharmaceutical product comprising a CD25-ADC as defined in any one of statements 1d to 7d, in combination with a label or insert advising that the CD25-ADC should be administered according to the method of any one of statements 1d to 79d.
86d. A kit comprising:

[2246] a first medicament comprising a CD25-ADC as defined in any one of statements 1d to 7d;

[2247] a second medicament as defined in either one of statements 22d or 23d; and, optionally,

[2248] a package insert or label comprising instructions for administration of the CD25-ADC according to the method of any one of statements 1d to 79d.

87d. A CD25-ADC as defined in any one of statements 1d to 7d for use in a method of any one of statements 1d to 79d.
88d. A pharmaceutical composition comprising a CD25-ADC as defined in any one of statements 1d to 7d, optionally in combination with a pharmaceutically acceptable excipient, for use in a method of any one of statements 1d to 79d.
89d. Use of a CD25-ADC as defined in any one of statements 1d to 7d in the preparation of a medicament for use in a method of any one of statements 1d to 79d.

[2249] It will be appreciated by one of skill in the art that appropriate dosages of the ADC and compositions comprising this active element, can vary from subject to subject. Determining the optimal dosage will generally involve the balancing of the level of therapeutic benefit against any risk or deleterious side effects. The selected dosage level will depend on a variety of factors including, but not limited to, the activity of the particular compound, the route of administration, the time of administration, the rate of excretion of the compound, the duration of the treatment, other drugs, compounds, and/or materials used in combination, the severity of the condition, and the species, sex, age, weight, condition, general health, and prior medical history of the subject. The amount of compound and route of administration will ultimately be at the discretion of the physician, veterinarian, or clinician, although generally the dosage will be selected to achieve local concentrations at the site of action which achieve the desired effect without causing substantial harmful or deleterious side-effects.

[2250] In certain aspects, the dosage of ADC is determined by the expression of CD25 observed in a sample obtained from the subject. Thus, the level or localisation of expression of CD25 in the sample may be indicative that a higher or lower dose of ADC is required. For example, a high expression level of CD25n may indicate that a higher dose of ADC would be suitable.

[2251] In some cases, a high expression level of CD25 may indicate the need for administration of another agent in addition to the ADC. For example, administration of the ADC in conjunction with a chemotherapeutic agent. A high expression level of CD25 may indicate a more aggressive therapy.

[2252] In certain aspects, the dosage level is determined by the expression of CD25 on neoplastic cells in a sample obtained from the subject. For example, when the target neoplasm is composed of, or comprises, neoplastic cells expressing CD25 In certain aspects, the dosage level is determined by the expression of CD25 on cells associated with the target neoplasm. For example, the target neoplasm may be a solid tumour composed of, or comprising, neoplastic cells that express CD25. For example, the target neoplasm may be a solid tumour composed of, or comprising, neoplastic cells that do not express CD25. The cells expressing CD25 may be non-neoplastic cells infiltrating the solid tumour, such as infiltrating lymphocytes (eg. Treg cells).

[2253] Administration can be effected in one dose, continuously or intermittently (e.g., in divided doses at appropriate intervals) throughout the course of treatment. Methods of determining the most effective means and dosage of administration are well known to those of skill in the art and will vary with the formulation used for therapy, the purpose of the therapy, the target cell(s) being treated, and the subject being treated. Single or multiple administrations can be carried out with the dose level and pattern being selected by the treating physician, veterinarian, or clinician.

[2254] In general, a suitable dose of each active compound is in the range of about 100 ng to about 25 mg (more typically about 1 μg to about 10 mg) per kilogram body weight of the subject per day. Where the active compound is a salt, an ester, an amide, a prodrug, or the like, the amount administered is calculated on the basis of the parent compound and so the actual weight to be used is increased proportionately.

[2255] In one embodiment, each active compound is administered to a human subject according to the following dosage regime: about 100 mg, 3 times daily.

[2256] In one embodiment, each active compound is administered to a human subject according to the following dosage regime: about 150 mg, 2 times daily.

[2257] In one embodiment, each active compound is administered to a human subject according to the following dosage regime: about 200 mg, 2 times daily.

[2258] However in one embodiment, each conjugate compound is administered to a human subject according to the following dosage regime: about 50 or about 75 mg, 3 or 4 times daily.

[2259] In one embodiment, each conjugate compound is administered to a human subject according to the following dosage regime: about 100 or about 125 mg, 2 times daily.

[2260] For the ADC the dosage amounts described above may apply to the conjugate (including the PBD moiety and the linker to the antibody) or to the effective amount of PBD compound provided, for example the amount of compound that is releasable after cleavage of the linker.

[2261] The CD25-ADC comprises an anti-CD25 antibody. The anti-CD25 antibody may be HuMax-TAC™. The ADC may comprise a drug which is a PBD dimer. The ADC is preferably ADCX25/ADCT-301/Camidanlumab Tesirine. The ADC may be an ADC disclosed in WO2014/057119.

[2262] Antibodies

[2263] The term “antibody” herein is used in the broadest sense and specifically covers monoclonal antibodies, polyclonal antibodies, dimers, multimers, multispecific antibodies (e.g., bispecific antibodies), intact antibodies (also described as “full-length” antibodies) and antibody fragments, so long as they exhibit the desired biological activity, for example, the ability to bind a first target protein (Miller et al (2003) Jour. of Immunology 170:4854-4861). Antibodies may be murine, human, humanized, chimeric, or derived from other species such as rabbit, goat, sheep, horse or camel.

[2264] An antibody is a protein generated by the immune system that is capable of recognizing and binding to a specific antigen. (Janeway, C., Travers, P., Walport, M., Shlomchik (2001) Immuno Biology, 5th Ed., Garland Publishing, New York). A target antigen generally has numerous binding sites, also called epitopes, recognized by Complementarity Determining Regions (CDRs) on multiple antibodies. Each antibody that specifically binds to a different epitope has a different structure. Thus, one antigen may have more than one corresponding antibody. An antibody may comprise a full-length immunoglobulin molecule or an immunologically active portion of a full-length immunoglobulin molecule, i.e., a molecule that contains an antigen binding site that immunospecifically binds an antigen of a target of interest or part thereof, such targets including but not limited to, cancer cell or cells that produce autoimmune antibodies associated with an autoimmune disease. The immunoglobulin can be of any type (e.g. IgG, IgE, IgM, IgD, and IgA), class (e.g. IgG1, IgG2, IgG3, IgG4, IgA1 and IgA2) or subclass, or allotype (e.g. human G1 ml, G1m2, G1 m3, non-G1 m1 [that, is any allotype other than G1 m1], G1m17, G2m23, G3m21, G3m28, G3m11, G3m5, G3m13, G3m14, G3m10, G3m15, G3m16, G3m6, G3m24, G3m26, G3m27, A2m1, A2m2, Km1, Km2 and Km3) of immunoglobulin molecule. The immunoglobulins can be derived from any species, including human, murine, or rabbit origin.

[2265] “Antibody fragments” comprise a portion of a full length antibody, generally the antigen binding or variable region thereof. Examples of antibody fragments include Fab, Fab′, F(ab′)₂, and scFv fragments; diabodies; linear antibodies; fragments produced by a Fab expression library, anti-idiotypic (anti-Id) antibodies, CDR (complementary determining region), and epitope-binding fragments of any of the above which immunospecifically bind to cancer cell antigens, viral antigens or microbial antigens, single-chain antibody molecules; and multispecific antibodies formed from antibody fragments.

[2266] The term “monoclonal antibody” as used herein refers to an antibody obtained from a population of substantially homogeneous antibodies, i.e. the individual antibodies comprising the population are identical except for possible naturally occurring mutations that may be present in minor amounts. Monoclonal antibodies are highly specific, being directed against a single antigenic site. Furthermore, in contrast to polyclonal antibody preparations which include different antibodies directed against different determinants (epitopes), each monoclonal antibody is directed against a single determinant on the antigen. In addition to their specificity, the monoclonal antibodies are advantageous in that they may be synthesized uncontaminated by other antibodies. The modifier “monoclonal” indicates the character of the antibody as being obtained from a substantially homogeneous population of antibodies, and is not to be construed as requiring production of the antibody by any particular method. For example, the monoclonal antibodies to be used in accordance with the present disclosure may be made by the hybridoma method first described by Kohler et al (1975) Nature 256:495, or may be made by recombinant DNA methods (see, U.S. Pat. No. 4,816,567). The monoclonal antibodies may also be isolated from phage antibody libraries using the techniques described in Clackson et al (1991) Nature, 352:624-628; Marks et al (1991) J. Mol. Biol., 222:581-597 or from transgenic mice carrying a fully human immunoglobulin system (Lonberg (2008) Curr. Opinion 20(4):450-459).

[2267] The monoclonal antibodies herein specifically include “chimeric” antibodies in which a portion of the heavy and/or light chain is identical with or homologous to corresponding sequences in antibodies derived from a particular species or belonging to a particular antibody class or subclass, while the remainder of the chain(s) is identical with or homologous to corresponding sequences in antibodies derived from another species or belonging to another antibody class or subclass, as well as fragments of such antibodies, so long as they exhibit the desired biological activity (U.S. Pat. No. 4,816,567; and Morrison et al (1984) Proc. Natl. Acad. Sci. USA, 81:6851-6855). Chimeric antibodies include “primatized” antibodies comprising variable domain antigen-binding sequences derived from a non-human primate (e.g. Old World Monkey or Ape) and human constant region sequences.

[2268] An “intact antibody” herein is one comprising VL and VH domains, as well as a light chain constant domain (CL) and heavy chain constant domains, CH1, CH2 and CH3. The constant domains may be native sequence constant domains (e.g. human native sequence constant domains) or amino acid sequence variant thereof. The intact antibody may have one or more “effector functions” which refer to those biological activities attributable to the Fc region (a native sequence Fc region or amino acid sequence variant Fc region) of an antibody. Examples of antibody effector functions include Clq binding; complement dependent cytotoxicity; Fc receptor binding; antibody-dependent cell-mediated cytotoxicity (ADCC); phagocytosis; and down regulation of cell surface receptors such as B cell receptor and BCR.

[2269] Depending on the amino acid sequence of the constant domain of their heavy chains, intact antibodies can be assigned to different “classes.” There are five major classes of intact antibodies: IgA, IgD, IgE, IgG, and IgM, and several of these may be further divided into “subclasses” (isotypes), e.g., IgG1, IgG2, IgG3, IgG4, IgA, and IgA2. The heavy-chain constant domains that correspond to the different classes of antibodies are called a, 6, e, y, and p, respectively. The subunit structures and three-dimensional configurations of different classes of immunoglobulins are well known.

[2270] Anti-CD25 antibodies are known in the art and are useful in the methods disclosed herein. These include antibodies 4C9 (obtainable from Ventana Medical Systems, Inc.). Other suitable antibodies include antibody AB12 described in WO 2004/045512 (Genmab A/S), IL2R.1 (obtainable from Life Technologies, catalogue number MA5-12680) and RFT5 (described in U.S. Pat. No. 6,383,487). Other suitable antibodies include B489 (143-13) (obtainable from Life Technologies, catalogue number MA1-91221), SP176 (obtainable from Novus, catalogue number NBP2-21755), 1B5D12 (obtainable from Novus, catalogue number NBP2-37349), 2R12 (obtainable from Novus, catalogue number NBP2-21755), or BC96 (obtainable from BioLegend, catalogue number V T-072) and M-A251 (obtainable from BioLegend, catalogue number IV A053). Other suitable anti-CD25 antibodies are daclizumab (Zenapax™) and basiliximab (Simulect™), both of which have been approved for clinical use.

### BRIEF DESCRIPTION OF THE FIGURES

[2271] Embodiments and experiments illustrating the principles of the disclosure will now be discussed with reference to the accompanying figures in which:

[2272] FIG. 1. Sequences

[2273] FIG. 2. In vivo MC38 tumour volume following mono-treatment with surrogate ADCx25, anti-PD1 treatment, or control ADC (as per Example 1)

[2274] FIG. 3. In vivo MC38 tumour volume showing synergy between low-dose surrogate ADCx25 and anti-PD1 treatment (as per Example 1)

[2275] FIG. 4. Re-challenge of tumour-free survivors from MC38 efficacy study (as per Example 3)

[2276] FIG. 5. In vivo CT26 tumour volume following mono-treatment with surrogate ADCx25, anti-PD1 treatment, or control ADC (as per Example 4)

[2277] FIG. 6. In vivo CT26 tumour volume showing synergy between low-dose surrogate ADCx25 and anti-PD1 treatment (as per Example 4)

[2278] FIG. 7. Re-challenge of tumour-free survivors from CT26 efficacy study (as per Example 5)

[2279] FIG. 8. ADCx25 anti-tumour activity is dependent on CD8+ T-cells

[2280] FIG. 9. ADCx25 plus PD-1 anti-tumour activity is dependent on CD8+ T-cells

[2281] FIG. 10. Spleen T-cell immuno-profiling after SurADCx25 dosing in healthy immuno-competent mice

[2282] FIG. 11. Lymph node T-cell immuno-profiling after SurADCx25 dosing in healthy immuno-competent mice

[2283] FIG. 12. Blood T-cell immuno-profiling after SurADCx25 dosing in healthy immuno-competent mice

[2284] FIG. 13. Thymus T-cell immuno-profiling after SurADCx25 dosing in healthy immuno-competent mice

[2285] FIG. 14. Tumour T-cell immuno-profiling after SurADCx25 dosing in CT26 tumor-bearing immuno-competent mice

[2286] FIG. 15. Spleen T-cell immuno-profiling after SurADCx25 dosing in CT26 tumor-bearing immuno-competent mice

[2287] FIG. 16. Blood T-cell immuno-profiling after SurADCx25 dosing in CT26 tumor-bearing immuno-competent mice

### STATEMENTS OF INVENTION

[2288] 1. A method of inducing or enhancing an immune response in a subject, the method comprising the step of administering a CD25-ADC to the subject.

[2289] 2. The method of statement 1, wherein the immune response is a disorder-associated antigen (DAA) specific immune response.

[2290] 3. The method of either one of statements 1 and 2, wherein the DAA-specific immune response is a CD8+ T cell response, a CD4+ T cell response, or an antibody response.

[2291] 4. The method of any one of statements 1 to 3, wherein the DAA-specific immune response is a CD8+ T cell response.

[2292] 5. The method of either one of statements 1 and 2, wherein the DAA-specific immune response is a memory cell response.

[2293] 6. A method of treating or preventing a disorder a subject, wherein the disorder is characterized by a disorder-associated antigen (DAA), the method comprising administering a CD25-ADC to the subject.

[2294] 7. A method of treating or preventing a disorder a subject, the method comprising administering a CD25-ADC to the subject.

[2295] 8. The method of any one of statements 1 to 7, wherein the CD25-ADC is administered in combination with a DAA.

[2296] 9. The method of any one of statements 2 to 8, wherein the DAA is a:
[2297] (a) protein, polypeptide, peptide, peptide mimetic;
[2298] (b) a nucleic acid encoding a protein, polypeptide, peptide, peptide mimetic
[2299] (c) a sugar or oligiosaccharide;
[2300] (d) a lipid, phospholipid, liposaccharide, or lipoprotein;
   [2301] optionally wherein the DAA is a cell-surface antigen.

[2302] 10. The method of either one of statements 8 and 9, wherein the DAA is administered as part of a vaccine composition, optionally wherein the CD25-ADC is also part of the same vaccine composition

[2303] 11. The method of either one of statements 9 and 10, wherein the vaccine composition comprises an adjuvant and, optionally a pharmaceutically acceptable excipient.

[2304] 12. The method of any one of statements 9 to 11, wherein the CD25-ADC is administered before the DAA or vaccine composition.

[2305] 13. The method of any one of statements 9 to 12, wherein the immune-suppressive activity of a population of regulatory immune cells in the subject is reduced by at least 90% before the DAA or vaccine composition is administered.

[2306] 14. The method of any one of statements 8 to 13, wherein the size of a population of regulatory immune cells in the subject is reduced by at least 90% before the DAA or vaccine composition is administered.

[2307] 15. The method of statement 14, wherein the regulatory immune cells are Treg cells.

[2308] 16. The method of any one of statements 8 to 11, wherein the CD25-ADC is administered concomitantly with the DAA or vaccine composition.

[2309] 17. The method of any one of statements 2 to 16, wherein, the dose of CD25-ADC administered is about 20 μg/kg to 80 μg/kg, such as about 20, 25, 30, 35, 40, 45, 50, 55, 60, 65, 70, 75, or 80 μg/kg.

[2310] 18. The method of any one of statements 2 to 17, wherein the DAA is a tumour-associated antigen (TAA);
[2311] optionally wherein the TAA is selected from the group consisting of BMPR1B, E16, STEAP1, 0772P, MPF, Napi3b, Sema 5b, PSCA hlg, ETB, MSG783, STEAP2, TrpM4, CRIPTO, CD21, CD79b, FcRH2, HER2, NCA, MDP, IL20R-alpha, Brevican, EphB2R, ASLG659, PSCA, GEDA, BAFF-R, CD22, CD79a, CXCR5, HLA-DOB, P2X5, CD72, LY64, FcRH1, IRTA2, TENB2, PSMA, SST, ITGAV, ITGB6, CEACAM5, MET, MUC1, CA9, EGFRvIII, CD33, CD19, IL2RA, AXL, CD30, BCMA, CT Ags, CD174, CLEC14A, GRP78-HSPA5, CD70, Stem Cell specific antigens, ASG-5, ENPP3, PRR4, GCC-GUCY2C, Liv-1-SLC39A6, 5T4, CD56-NCMA1, CanAg, FOLR1, GPNMB, TIM-1-HAVCR1, RG-1, B7-H4-VTCN1, PTK7, CD37, CD138, CD74, Claudins, EGFR, Her3, RON-MST1R, EPHA2, CD20-MS4A1, Tenascin C-TNC, FAP, DKK-1, CD52, CS1-SLAMF7, Endoglin, Annexin A1, V-CAM (CD106), DLK-1, and KAAG1.

[2312] 19. The method of any one of statements 2 to 17, wherein the DAA is a pathogen-associated antigen (PAA).

[2313] 20. The method of statement 19, wherein the PAA is derived from a pathogen selected from the group consisting of a virus, bacterium, fungus, protozoa, parasite, prion protein, or protein aggregate;
[2314] optionally wherein the pathogen is selected from:
[2315] Adeno-associated virus, Aichi virus, Australian bat lyssavirus, BK polyomavirus, Banna virus, Barmah forest virus, Bunyamwera virus, Bunyavirus La Crosse, Bunyavirus snowshoe hare, Cercopithecine herpesvirus, Chandipura virus, Chikungunya virus, Cosavirus A, Cowpox virus, Coxsackievirus, Crimean-Congo hemorrhagic fever virus, Dengue virus, Dhori virus, Dugbe virus, Duvenhage virus, Eastern equine encephalitis virus, Ebolavirus, Echovirus, Encephalomyocarditis virus, Epstein-Barr virus, European bat lyssavirusalitis, GB virus C/Hepatitis G virus Pegivirus, Hantaan virus, Hendra virus, Hepatitis A virus, Hepatitis B virus, Hepatitis C virus, Hepatitis E virus, Hepatitis delta virus, Horsepox virus, Human adenovirus, Human astrovirus, Human coronavirus, Human cytomegalovirus, Human enterovirus 68, 70, Human herpesvirus 1, Human herpesvirus 2, Human herpesvirus 6, Human herpesvirus 7, Human herpesvirus 8, Human immunodeficiency virus, Human papillomavirus 1, Human papillomavirus 2, Human papillomavirus 16,18, Human parainfluenza, Human parvovirus B19, Human respiratory syncytial virus, Human rhinovirus, Human SARS coronavirus, Human spumaretrovirus, Human T-lymphotropic virus, Human torovirus, Influenza A virus, Influenza B virus, Isfahan virus, JC polyomavirus, Japanese encephalitis virus, Junin arenavirus, KI Polyomavirus, Kunjin virus, Lagos bat virus, Lake Victoria Marburgvirus, Langat virus, Lassa virus, Lordsdale virus, Louping ill virus, Lymphocytic choriomeningitis virus, Machupo virus, Mayaro virus, MERS coronavirus, Measles virus, Mengo encephalomyocarditis virus, Merkel cell polyomavirus, Mokola virus, Molluscum contagiosum virus, Monkeypox virus, Mumps virus, Murray valley encephalitis virus, New York virus, Nipah virus, Norwalk virus, O'nyong-nyong virus, Orf virus, Oropouche virus, Pichinde virus, Poliovirus, Punta toro phlebovirus, Puumala virus, Rabies virus, Rift valley fever virus, Rosavirus A, Ross river virus, Rotavirus A, Rotavirus B, Rotavirus C, Rubella virus, Sagiyama virus, Salivirus A, Sandfly fever sicilian virus, Sapporo virus, Semliki forest virus, Seoul virus, Simian foamy virus, Simian virus 5, Sindbis virus, Southampton virus, St. louis encephalitis virus, Tick-borne powassan virus, Torque teno virus, Toscana virus, Uukuniemi virus, Vaccinia virus, Varicella-zoster virus, Variola virus O, Venezuelan equine encephalitis virus, Vesicular stomatitis virus, Western equine encephalitis virus, WU polyomavirus, West Nile virus, Yaba monkey tumor virus, Yaba-like disease virus, Yellow fever virus, and Zika virus;
[2316] Acetobacter aurantius, Acinetobacter baumannii, Actinomyces israelii, Agrobacterium radiobacter, Agrobacterium tumefaciens, Anaplasma sp. inc. Anaplasma phagocytophilum, Azorhizobium caulinodans, Azotobacter vinelandii, Bacillus, Bacillus anthracis, Bacillus brevis, Bacillus cereus, Bacillus fusiformis, Bacillus licheniformis, Bacillus megaterium, Bacillus mycoides, Bacillus stearothermophilus, Bacillus subtilis, Bacillus Thuringiensis, Bacteroides sp. inc Bacteroides fragilis, Bacteroides gingivalis, Bacteroides melaninogenicus, Prevotella melaninogenica, Bartonella sp. inc. Bartonella henselae, Bartonella Quintana, Bordetella sp. inc. Bordetella bronchiseptica, Bordetella pertussis, Borrelia burgdorferi, Brucella sp. inc. Brucella abortus, Brucella melitensis, Brucella suis, Burkholderia sp. inc. Burkholderia mallei, Burkholderia pseudomallei, Burkholderia cepacia, Calymmatobacterium granulomatis, Campylobacter sp. inc. Campylobacter coli, Campylobacter fetus, Campylobacter jejuni, Campylobacter pylori, Chlamydia sp. inc. Chlamydia trachomatis, Chlamydophila sp. inc. Chlamydophila pneumoniae, Chlamydophila psittaci, Clostridium sp. inc. Clostridium botulinum, Clostridium difficile, Clostridium perfringens, Clostridium tetani, Corynebacterium sp. inc. Corynebacterium diphtheriae, Corynebacterium fusiforme, Coxiella burnetii, Ehrlichia chaffeensis, Enterobacter cloacae, Enterococcus sp. inc. Enterococcus avium, Enterococcus durans, Enterococcus faecalis, Enterococcus faecium, Enterococcus galllinarum, Enterococcus maloratus, Escherichia coli, Francisella tularensis, Fusobacterium nucleatum, Gardnerella vaginalis, Haemophilus sp. inc. Haemophilus ducreyi, Haemophilus influenzae, Haemophilus parainfluenzae, Haemophilus pertussis, Haemophilus vaginalis, Helicobacter pylon, Klebsiella pneumoniae, Lactobacillus sp. inc. Lactobacillus acidophilus, Lactobacillus bulgaricus, Lactobacillus casei, Lactococcus lactis, Legionella pneumophila, Listeria monocytogenes, Methanobacterium extroquens, Microbacterium multiforme, Micrococcus luteus, Moraxella catarrhalis, Mycobacterium sp. inc. Mycobacterium avium, Mycobacterium bovis, Mycobacterium diphtheria, Mycobacterium intracellulare, Mycobacterium leprae, Mycobacterium lepraemurium, Mycobacterium phlei, Mycobacterium smegmatis, Mycobacterium tuberculosis, Mycoplasma sp. inc. Mycoplasma fermentans, Mycoplasma genitalium, Mycoplasma hominis, Mycoplasma penetrans, Mycoplasma pneumoniae, Neisseria sp. inc. Neisseria gonorrhoeae, Neisseria meningitides, Pasteurella sp. inc. Pasteurella multocida, Pasteurella tularensis, Peptostreptococcus, Porphyromonas gingivalis, Prevotella melaninogenica, Pseudomonas aeruginosa, Rhizobium radiobacter, Rickettsia sp. inc. Rickettsia prowazekii, Rickettsia psittaci, Rickettsia quintana, Rickettsia rickettsia, Rickettsia trachomae, Rochalimaea sp. inc. Rochalimaea henselae, Rochalimaea quintana, Rothia dentocariosa, Salmonella sp. inc. Salmonella enteritidis, Salmonella typhi, Salmonella typhimurium, Serratia marcescens, Shigella dysenteriae, Spirillum volutans, Staphylococcus sp. inc. Staphylococcus aureus, Staphylococcus epidermidis, Stenotrophomonas maltophilia, Streptococcus sp. inc. Streptococcus agalactiae, Streptococcus avium, Streptococcus bovis, Streptococcus cricetus, Streptococcus faceium, Streptococcus faecalis, Streptococcus ferus, Streptococcus gallinarum, Streptococcus lactis, Streptococcus mitior, Streptococcus mitis, Streptococcus mutans, Streptococcus oralis, Streptococcus pneumoniae, Streptococcus pyogenes, Streptococcus rattus, Streptococcus salivarius, Streptococcus sanguis, Streptococcus sobrinus, Treponema sp. inc. Treponema pallidum, Treponema denticola, Vibrio sp. inc. Vibrio cholerae, Vibrio comma, Vibrio parahaemolyticus, Vibrio vulnificus, Wolbachia, Yersinia sp. inc. Yersinia enterocolitica, Yersinia pestis, and Yersinia pseudotuberculosis;
[2317] Aspergillus sp., Candida sp. including C. albicans and C. auris, Coccidioides sp., Cryptococcus gattii, Pneumocystis jirovecii, Sporothrix sp., Blastomyces sp., Cryptococcus neoformans, Histoplasma sp., Talaromyces sp. including T.marneffei, Anncaliia algerae, A. connori, A. vesicularum, Encephalitozoon cuniculi, E. hellem, E. intestinalis, Enterocytozoon bieneusi, Microsporidium ceylonensis, M. africanum, Nosema ocularum, Pleistophora sp., Trachipleistophora hominis, T. anthropophthera, Vittaforma corneae, and Tubulinosema acridophagus;
[2318] Acanthamoeba, Trypanosoma sp. including T. brucei, T. cruzi, and T. evansi, Plasmodium sp. including P. falciparum, P. vivax, P. ovale, P. malariae, P. knowlesi, P. relictum, P. anasum, and P. gallinaceum, Hemoproteus sp., Babesia sp., Besnoitia sp., Blastocystis sp., Cryptosporidium sp. including C. parvum and C. hominis, Cyclospora cayetanensis, Dientamoeba fragilis, Giardia so. including G. lamblia and G. intestinalis, Histomonas meleagridis, Sappinia sp. including S. diploidea and S.pedata, Toxoplasma gondii, and Trichomonas vaginalis;
[2319] Echinococcus sp. including E. granulosus and E. multilocularis, Entamoeba histolytica, Ancylostoma sp. including A. brazilense, A. caninum, and A. ceylanicum, Uncinaria stenocephala, Angiostrongylus sp. including Angiostrongylus cantonensis, Ascaris sp. including A. lumbricoides and A. suum, Balantidium coli, Balamuthia mandrillaris, Baylisascaris procyonis, Schistosoma sp. including S. mansoni, S. haematobium, and S. japonicum, Capillaria hepatica, Capillaria philippinensis, Clonorchis sp., Taenia sp. including T. solium, T. saginata, and T. asiatica, Diphyllobothrium sp. including Diphyllobothrium latum, Dipylidium sp., Dracunculus medinensis, Enterobius vermicularis, Fasciola sp. including Fasciola hepatica, Fasciolopsis buski, Gnathostoma sp., Heterophyes heterophyes, Naegleria fowleri, Onchocerca volvulus, Paragonimus sp., Sarcocystis sp., Strongyloides sp., Toxocara canis, Toxocara cati, and Trichinella sp.; and PrPI, PrPres, and PrPSc

[2320] 21. The method of statement 19, wherein the PAA is selected from the group consisting of:

[2321] Q69549, Q07852, Q2HR82, Q7T928, P0C742, AOAOPOEFP7, Q80908, Q98839, Q9QJ49, P06427, P68564, Q5GFC6, Q3KSQ7, AOAOPOERXO, PODJZ1, Q98223, P03193, P04016, P04364, ElU5P1, P14353, AOAOPOELC3, Q9PX75, Q7T5D1, F5HG51, P17384, Q9QR71, E1U5N7, P29170, AOAON716U3, P03285, Q98226, P89471, P27225, Q3KSP4, Q5VHB0, P03493, B5SNS7, P20879, Q98200, P52540, Q07857, Q3KSP5, Q5GFC1, P0C723, B5SNR2, P09295, Q2KS45, F5HINO, P21735, P20540, Q76DN6, P21043, B5SNS8, P03286, Q2KS32, Q9WF19, P22422, P35986, Q8BEL8, P33861, B5SNRO, P09731, Q9PWVO, P33828, P24836, Q1HVC3, Q76RB7, P0C733, B5SNS9, F5HDD3, Q2KS76, Q0R5R3, P26555, Q8AZJ5, Q76RD5, Q3KSS5, B5SNS4, P09730, Q9PX47, P03086, P50782, P0C726, A9J188, Q1HVD3, B5SNT9, Q7M6G6, 11V199, P21097, P36825, P29996, A9J194, P0C722, B5SNS6, P09721, Q2TQY6, Q89187, P17387, P33803, Q77DT3, Q1HVF8, A9JOQ5, P09720, Q3S8C7, P20988, F5HAY6, P33042, Q6J3L8, Q1HVG1, A9JOW5, P09716, Q6QCM3, P20992, P03105, P03263, Q8QMU7, P68599, A9J1E2, F5H9N9, Q6QCP6, P68614, P36741, Q1HVD1, Q81971, P21041, A9J1J8, P21045, Q77JF8, P33843, Q9JH45, P03177, Q8QMX2, P24937, A9J1G6, P21099, Q6QCK2, P21057, P50798, P20843, 057247, Q81871, A9J1E9, P21100, Q6QCQ0, P33851, P03101, P33041, Q8QN10, P03277, A9JOX4, Q80923, Q6QCV8, P68618, P50822, P89446, C3V9V5, P03276, A9J141, P36723, Q6QCP2, P21065, P50800, Q3KSQ2, Q75Q70, P0C738, A9JOZ6, P26547, Q6QCM2, Q76QZ9, Q07861, P09250, Q91W62, P21036, A9JOS4, P17382, Q6QCWO, P21074, P50788, P21028, B9A5A8, P33859, A9JOV2, P36725, Q6QCL6, P68597, P36736, P18095, B9A5C6, P03284, A9JOW7, P06927, Q98222, P33835, Q80912, Q73367, B9A5D6, 012792, A9JOR2, P03118, Q806A8, P33836, P68320, P04591, Q3KSQ4, Q9DUC4, A9JON9, P04015, Q98261, P33837, P22425, P20874, Q4TUF4, P36716, A9J170, P27221, Q98216, PODJY9, Q98157, P08666, Q5VHB9, P21089, A9J138, P06463, Q98317, POCK28, P35256, P28864, Q5GFC8, Q9PX71, A9JOX6, P0DOD0, Q805Y6, Q6TUQ9, Q05128, P10189, Q8BEL5, Q9PX43, A9J107, Q80948, Q7T5D7, P33840, F5HC97, P52450, Q5VHC3, P21000, A9J1M0, Q45UF8, Q98315, P33842, Q9QJ40, P20978, Q5VHC6, P21001, A9J1K3, Q73369, Q98319, POCK20, Q9ENL1, F5HIG1, Q76RC6, Q9QJ58, A9J1R0, 070901, Q98275, P33847, Q89865, P10192, B9A5C1, P21115, A9J1T7, P60170, Q98311, P60672, Q77375, P89431, B9A5E0, P03224, A9J152, Q01351, Q76SZ3, P68616, Q9WT46, P52375, B9A5D2, P68345, A9J1U3, P52516, Q98210, P33854, P60505, P52451, B9A5A7, P03199, A9J101, P24435, Q98256, Q89183, Q9WT54, P04850, B9A5BO, Q3KST3, A9J1L5, Q9QJ28, Q98188, P21060, F5HCP3, Q6WB98, B9A5D9, P03197, A9JOU9, Q01352, Q76SZ4, P33832, P16773, 036634, B9A5D8, Q3KST5, A9J127, P52444, Q806B9, P21061, Q6SW10, P26629, Q3KSQ9, P30117, A9J1J4, P52445, Q7T5E1, P33855, F5HGQ8, Q77372, B9A5C5, Q3KSU2, A9J1K6, P20511, Q98294, P21069, F5H9Z4, P10211, B9A5B7, Q1HVH3, A9J136, P20523, Q805Y9, P21070, F5HAM0, P21022, Q5GFC2, P0C737, A9JOW9, P21085, Q806B8, P21066, P16741, P32991, E1U5P5, P03210, A9JOR8, P21119, Q89900, P21063, A8W995, P03347, Q5GFA9, P03206, A9J1K5, P21121, 11V175, P20990, P68620, P04592, E1U5P9, P21044, A9J114, P20542, 11V198, P33838, Q9QJ45, Q8JSZ3, Q8BEL7, P21104, A9J1E5, P20559, Q2KS4I, POCK27, Q69569, PODOEO, B9A5A6, P33797, A9JOP1, P68491, Q6JGG8, P20991, Q6SW14, P68762, B9A5B8, P12537, A9JOV4, P20551, Q2KS68, Q89489, P89436, P11235, K7ZLNO, P03274, A9J161, P20510, Q82009, P20535, P52463, P21030, Q3KSRO, P0C717, A9J1L4, P68485, Q4JEP8, P33816, Q9QJ33, P36320, Q6TV17, P30119, A9JOR6, P20512, Q82005, P33848, P52464, P0C763, B9A5B2, P0C734, A9J112, P68487, Q6QC16, P33850, F5HF47, Q69091, F8S4P1, P34016, A9JOT9, P20513, Q77JF7, P33852, P16821, P04488, C9EA16, 057211, A9J103, Q9DUC3, Q6QCL5, P33853, F5H8Q3, P89475, Q5VHA2, P33065, A9J148, Q9WGZ1, Q6QCL3, P33876, P16756, P68324, E1U5N3, P36713, A9J110, P68475, Q6QCT9, P21071, P16766, F5HAK9, Q6QCL1, 070739, A9J1V5, P68477, Q6QCQ2, P21067, Q6SW63, Q9QOU6, Q67721, Q9QU30, A9JOXO, P20547, Q6QCJ5, P33856, F5HAE6, P16827, Q6QCT4, P03207, A9J123, P20548, Q6X674, P21068, P52548, P52376, Q6QCQ1, Q3KSS8, A9JOU1, P20553, Q6QCP5, Q89186, Q06092, Q2HR92, Q6QCJ9, P21106, A9JOU3, P68626, Q6QCM5, P68595, P16798, P09300, Q3KSU9, P21090, B8XTP8, P20526, Q775H9, P33794, P08560, P90489, Q3KSVO, P21039, A9J1G1, P21120, Q6QCN1, P68594, F5HFB4, P03179, Q3KSU6, P34013, A9J1J5, P20527, Q6QCU3, P20534, Q6SW55, Q3KSV4, Q9QCF1, P34014, A9J1L3, P20530, Q6QCN2, P33839, P16813, Q1HVJO, Q98198, P33860, A9J114, P21123, Q6QCN5, P20994, P09288, Q6WB99, Q98255, P21042, A9J134, P20552, Q98213, Q07032, P16731, PODJX6, Q98274, Q9WSV7, A9JOQ7, F5HET4, Q98215, P21114, Q9WT06, Q3KSR5, Q7T5C1, P04133, A9J129, Q69548, Q98280, P68632, P52472, F5HF49, Q805Z9, Q9PZTO, A9JOW3, Q9QJ50, Q98197, P21096, P16762, P24935, Q98236, P12538, A9JOT7, F5H8R0, Q98259, P33849, P16787, P52448, Q98282, P21040, A9JOX5, Q69550, Q98248, P20993, Q6SWA4, Q2HR95, 040975, P20508, A9J1N4, P90463, Q98273, P68592, Q6SW89, Q1HVE7, Q98244, P03279, A9J1M1, Q9QJ46, Q98193, P33827, P16786, P16789, Q806C1, P36712, A9J1NO, Q69558, Q98283, P21058, Q6SW82, P04294, Q98278, P35988, A9JOX2, Q9QJ43, Q98307, P21064, P16775, P59632, Q7T5D6, P03281, A9J1R4, Q9QJ41, Q98196, P33844, P17146, P16728, Q806C0, P24447, A9J1F0, Q69559, Q7T5C5, P20985, Q6SWC3, F5HGN8, Q98271, P52346, A9J117, P52529, Q7T5C4, P33833, P16833, P09291, Q98302, P09253, A9J1T0, P03293, Q7T5E9, P20987, P16721, F5HE74, Q8V727, P03195, A9J1V3, Q7TLC7, Q7T5D4, PODJZ0, P10186, Q69551, Q7T400, Q3KST7, A9J1J3, PODKB2, Q805Z8, P33841, Q20MD0, Q89882, Q98175, P89469, A9JOU5, Q9ENK7, Q7T5E8, P20989, Q20MD6, F5HHS3, Q806A4, Q2HRC6, A9J1R6, A5HBD5, Q89478, Q98300, Q9WF16, P16845, Q806C2, P21050, A9JOY6, P35258, Q9YIE0, P20995, Q9WF14, P16849, Q98272, P68449, A9J1L0, Q9ENL4, Q6RK96, Q89485, Q9WF20, P17148, Q98301, P33822, A9J1F7, Q91N14, Q9PWU3, P20996, Q98172, P16822, Q98237, P21081, A9JOQ2, Q89843, Q5EY84, P20983, Q98281, P52545, Q98310, P21080, A9J132, P20882, Q4JEP6, P33858, Q98203, Q2HRB2, Q98227, P33862, A9J1E3, POC1C6, Q9PX68, P33857, Q98293, Q69554, Q7T5E6, P14351, A9J172, P03290, Q2KS40, P09279, Q98322, Q9WT45, Q7T401, P14075, A9J150, P03294, Q2KS44, P14348, Q98297, P24437, Q98284, QOR5Q9, A9J1N6, P27557, Q6RK77, Q76QZ8, Q98312, P16801, Q806C4, P03383, A9J1C9, P03107, 11V197, P20531, Q87644, Q6SW48, Q805Z1, P04581, A9J1M3, Q05138, Q5EY48, P20842, Q98204, F5HFG3, Q89811, Q77377, A9J110, P03099, Q2KS77, Q5MQDO, Q98219, P16814, Q1WDN6, P20872, A9J1F2, P36753, Q2KS62, P03083, Q98328, P16797, Q806B4, P33064, A9J1 16, P36755, Q6RK85, A5HBD7, Q98206, F5HFJ8, Q98289, P03255, A9J112, P06794, Q9PX39, P20880, Q98205, P24439, Q85288, P03259, A9J1P3, P06418, 11V161, Q73370, Q6TVS6, P16781, Q7T5D2, P03243, A9J157, P32990, Q77SK4, P04611, Q6TVL3, P16847, Q806A5, P04491, A9JOZ4, P36735, Q9WF18, P04608, Q6TVMO, POCK56, Q98270, P36705, A9JOX9, P33814, Q7ZBU5, P14079, Q6TVT7, P16719, Q98309, PODJX0, A9J1D8, P25486, Q76630, F5HF23, Q6TVJ4, Q6SW79, Q7T5C2, Q3KSU3, A9J1D1, Q02515, 11V8P0, P04487, Q6TVJ8, P28282, Q98212, P03211, A9J0P3, P27558, Q6TUQ1, F7V996, Q6TVT5, P16816, Q98316, Q3KSS4, A9JOS7, Q80918, Q6TUQ0, P68608, Q6TVK9, P16746, Q98269, Q69022, Q80945, P06918, Q6TUP1, P33805, Q6TVL6, Q6SWC6, A7KCN3, Q1HVG4, Q89184, Q80946, Q6TUS9, P15423, Q6QCV5, P16776, Q98286, P68634, Q07045, Q80953, Q6TUY4, P24940, Q6TVN7, P16737, Q8V721, P06498, 013311, Q5MQC7, DOZ5U4, P21077, Q6TVKO, P16828, Q805Y1, P36707, Q20MC9, Q6Q1R9, DOZ5T3, P21062, Q6TVS8, P16829, Q7T5C8, P68978, Q83977, P35260, DOZ5S5, P24933, Q6TVK5, P16738, Q9YIWO, P36709, Q20MD1, Q91N13, DOZ5T4, P68340, Q6TVJO, P16770, Q98202, P21047, Q20MC7, P69481, DOZ5U8, PODOE5, Q6TVR8, P28275, Q98321, P33819, Q83976, P52439, Q9PWU2, P36714, Q6TVU9, P32988, Q805Z3, P06497, Q9WF13, P52440, DOZ5U9, P22112, Q6TVU1, P04413, Q7T5C6, P03242, G8H3V2, Q9YJJ8, DOZ5U3, P21132, Q6TVK6, P09722, Q806A6, P03191, Q80924, P05956, DOZSU1, P20841, Q6TV18, Q6SW00, Q98279, POC6Z1, D6NGF9, P69726, DOZ5R9, P33831, Q6TVM5, F5HDK1, Q805Y0, F5HGH5, 11V8N7, P05954, Q80929, Q6Q1S2, Q6TVK4, P69332, Q98186, Q82040, 11V8N8;
[2322] P13423, Q9S5G6, Q7CCJ3, Q9L6R5, Q00473, C6DHE3, P9WIQ6, P37669, P42382, P31494, Q9AIX9, P9WL65, B1JS09, P9WLS9, Q83F12, Q2FDM1, P39180, P58237, P21979, Q9L6Q8, Q9HUF7, POAG01, L8FKX3, B1LLW8, P26950, P45680, Q9AJ64, 053379, Q56978, QOSYY3, P62605, Q2FUX3, P9WGU1, P72139, Q07297, Q57HS2, P26403, B4TNU6, P0A569, Q1R4E1, QOPAS1, C3PCX2, Q9AJ75, POAB35, P9WG11, P27833, P11089, Q6GDG4, P9WQP1, P9WJA3, Q7A3D7, B4SZ40, P26406, A8G841, PODOA7, B5QVI4, P18194, Q73DZ5, BORVK4, POAB37, P9WGU0, B7MH57, Q06968, Q6G636, P9WIR7, Q9ZGM0, Q6GDN3, POAAA8, P37746, QOSYY4, P9WJD7, B5XYX5, P0C109, Q63GDO, 067998, P33792, QOP9X8, Q1CNJ1, Q06970, Q31SH3, P9WMK1, P60665, Q6G6A8, B7NTE8, Q07024, P9WLS5, P9WNK4, P27828, POA3P1, Q7A6D2, Q04974, Q04976, A1VZQ4, A4TRB6, Q06982, Q3YTH5, P9WPE7, Q4A122, Q79ZY3, A8A6P9, Q48476, P19478, 032629, B5BIU1, POA3P2, A8ZOC1, 066256, 031822, Q6F7F9, B5BIU3, Q06983, P18012, P9WK61, Q05852, Q5HDQ9, A9R8J0, Q06951, P18164, P44935, Q7MYM6, E4QEX4, B9DQ98, P16665, Q8FVC3, Q57254, Q66G07, P02975, Q6G6A5, P9WQN9, Q5HD54, Q8NV83, B1LLW7, Q50864, Q92BW7, Q83AF7, B4F1W8, POCOJ7, Q5HQE7, P37917, Q83BT6, P9WMK0, POAC79, E3PPC4, P18014, J714B7, Q6GDU6, Q53587, Q04866, P52642, Q48754, P14727, B5QVI6, Q9LBG3, P31495, Q83F59, P9WN15, P50927, POAC78, POCK93, B2TT54, P9WQP3, Q5HLD1, P31784, Q6CZF1, Q8Z514, P9WM17, 030620, B7UNB2, P11657, PODJH1, P07643, Q6U113, P50928, A7FD62, P11312, Q03947, POC2T2, Q8CR67, Q5HCY4, 033789, P37748, Q83AX3, P68641, A1AHW3, Q9KKA3, Q6G2B2, P29721, Q9RNC7, Q84168, B7M5E2, P04740, Q54150, P9WQB1, P77682, P16952, POAG02, P0A236, Q83A32, P21762, Q1CNJ0, Q2YLR6, Q9S3N1, P19649, F7YJG6, Q1RGK9, C4ZZ62, P02973, P9W155, P9WPE5, P43413, Q7BQ98, A9MXG6, Q56083, Q2YIU6, P26276, Q8FBP8, P05430, Q81IA1, P29720, Q9R2W4, P29697, B1LLW6, P33781, A7X6T9, P9WNK5, Q9S5G3, P46861, B5BIU2, Q00329, Q579D9, POCOB3, P27835, POCL66, P54166, P29724, Q04972, POA3N4, A8A6Q0, Q06971, Q7A377, P9WK45, Q06963, Q83D73, Q8Z396, POA1P4, Q9ZDHO, P27951, 033953, 031178, A6U0C2, P38369, Q45207, Q9F9F2, Q1CNI9, Q06974, Q8VSC3, Q06277, Q7DBF3, Q9HTB6, A7FD61, P27243, P43112, P45430, B614D1, Q8KQL6, Q2F160, P37761, G3XD61, Q52764, BlIWA5, P06179, P18011, B5XK69, Q8DR60, P55293, P43109, P37742, Q45214, Q661N6, B7LU62, P9WIG7, A5IRJ3, P55294, P37749, Q9KH57, Q9L6R7, POA2K7, Q03946, P9WMU1, Q5LGZ8, P37745, P43110, P37755, P0A687, Q9X6B1, P95730, P96989, Q8CPR3, P26391, P37750, Q04102, B614D2, POAEP6, Q2FDT8, Q53020, Q9S5G4, P37763, Q9RND2, P26405, P9WIG4, Q63K34, P37792, Q83EK8, AOR9F0, BORVLO, P71241, POA5B8, B5FN86, P25733, Q2FV52, P29723, P9WG64, Q46769, P21876, P26404, P9WIG5, P26949, B5EZ53, PODJ01, B7H9Q4, POC7J0, P26388, P50929, Q8ZAE1, Q3KMQ9, Q2YWD9, P9WJD9, P9WGM7, P61888, P29228, Q48478, P9WMU0, Q02192, POAG00, P18195, Q651A4, P37780, Q9XC60, P50930, B7LU61, POCOZ7, Q5HCY1, P02974, Q9L5X1, P31782, Q45215, Q05347, Q03084, Q63K37, B5FN87, PODH58, Q8NXC3, Q51832, Q8KIU8, P16624, A6TGI3, Q5ZXP3, Q6GDN1, Q49575, Q9L5X0, P9WGE7, Q45212, P37781, G3XD23, Q9X6B2, B5QV15, P15921, Q81YW9, P26392, PODMP6, P50931, COQ3A6, P16625, P60157, Q8FDQ2, PODF61, P23504, P11000, P0A235, B2TU00, P26948, C3LHC1, POCL67, C1EWE6, P37759, P67066, POA3N5, Q8Z395, P48219, Q5HL49, Q53047, POA4G3, Q53781, POA5N3, P37784, Q8Z389, Q63K35, B7JNE4, B7J1T8, A8FED1, Q6E7F4, Q9L6R4, Q7PA29, B5L3X1, P48214, Q8CMZ9, P33406, P31304, Q2G2J2, P37751, P26395, Q8ZAE4, QOSNDO, G3XD94, Q9HUG6, P22940, Q9S642, P67067, P22882, B5L3F2, G4WJD4, Q4AOG5, POCOJ8, P42363, Q6G723, P36667, Q05342, Q1CBP2, Q45010, P31496, Q83BSO, P37916, P37777, Q3YVHO, 052972, A8ACU6, P24301, A71Y64, PODJ00, Q9L5W9, Q2G2U9, Q4KXC9, P26471, A8ACU5, Q9ZLT1, P37918, P80369, 032270, P26394, A9R819, AOQU51, B7MH58, P12834, Q2YZ63, P26493, PODF60, A6QES8, P43111, Q48479, A7ZTZ6, P55980, Q02938, P20148, P17915, Q2SYI1, Q8XAS7, P9WQP0, B7L952, P69050, POA3L9, Q81QT1, P9WIN9, P13367, Q8KQC3, Q50863, B1JPZ9, A1VYV6, Q04973, P85410, Q2MGH6, Q7VJ79, P37457, 006052, B1IWA6, P24428, B1MHR6, Q9ABRO, Q07408, P80582, P29230, Q56902, B7MR14, P26926, Q04975, P13415, Q8A2Z5, P57041, B7L953, Q05861, P35272, P33548, J9W7B2, Q8P120, POA5Q3, P31781, Q49536, Q56903, A8ACU7, P94851, Q4L524, 006653, B1V8K7, E6MXWO, Q8XAQ3, P46729, B7NF99, POA2U4, AOAOH3MGR5, Q9AHT6, P9WNF5, P37779, Q49537, Q2FE11, B7M5E0, Q83ES6, B7HU46, P9W141, 030405, Q52657, Q8FBP9, P46730, Q1R4E2, Q326Z6, AOAOH3M3S8, Q99ZN9, P42364, P61887, Q49538, Q2FVC1, A7MQI6, P9WNB1, A9VSQ8, P9WHZ3, Q9A9H3, Q08137, P56258, P46731, B2VG51, Q03945, P9WK44, PODC90, Q9KIJ3, P55254, 085341, Q9ZB73, B7UNB3, P9WNQ7, Q2YWW6, Q6GDU9, Q826C5, P9WP33, B1XAG6, P46732, Q7MYM5, P65645, 007750, Q5XC63, Q9CFZ5, P26393, PODMP7, Q79FB3, A8A6P8, P9WNR7, Q6G167, Q6G613, Q06952, P9WQB0, A9R8J1, P12809, A9MJ16, Q9LAB5, Q49803, Q49588, POA4G4, BORVK9, P26389, Q83AH2, B5YY43, P9WNK3, Q49WE6, Q8NUV4, Q49VP4, Q00488, B5EZ52, P58248, Q57HS3, Q8X8T3, A5U990, P9WGT7, P31305, P44914, Q5JBG6, Q9KW51, B1IWA7, PODOA6, B71W03, P18159, Q2FE05, P13719, A9MJ17, A1KJU9, B4TB26, Q51473, P9WK60, P46024, POA4V7, P37760, Q58YV9, Q99RE2, B2K060, P0A567, A7GKYO, Q2YW66, Q99RD4, P0C934, B5RFR1, P21160, B4SZ39, P72138, P24094, P29725, Q49771, POC8S3, Q9HZ76, Q7A3K7, A1AHW4, P54925, A7XOP5, Q5HD61, Q6G6H5, P19993, Q8XAR8, Q50397, Q5PKK8, Q9ZGM1, Q9ZJ31, 031357, P9WIN6, P37778, A8G840, Q8CN38, Q6CZF0, P9WP32, Q2FZP7, P41484, Q3S2Y1, P24093, Q5PKK9, POA4V5, BORVK6, Q83ELO, Q72U69, P0C223, P9WIN7, P37744, Q31UJ1, Q4L9R5, Q8FBP7, P9WNZ7, A6QFM7, P9WIM6, P77293, P43313, B5EZ54, POC2T1, Q329X2, Q7A3J9, T2GP47, Q45011, Q5XDI6, P55253, Q329X1, Q9ZCX6, Q7MYM4, POC1D7, Q99V75, P9WIM7, Q9JRN5, 068770, B5RFQ9, Q2YKY9, Q83IX6, Q9CCP6, P9WK74, Q83CY8, Q8P280, POC7J4, Q83PH8, Q7DBF7, B1JPF1, P0A647, Q6GARO, Q50703, Q51366, P9WNB3, B4TB27, P19361, P29229, A5U2B3, POA5J1, POA3U8, POA4G2, P55257, A9MXG7, Q79FU3, B4TB25, P40136, Q3S2Y2, Q6FFS6, Q56598, Q93GW2, B7MR15, P14062, P21875, Q01411, AOAOH3M9Z0, P17953, P9WNF3, P27830, B7UNB1, Q5HLD2, C6DHE2, Q9ZKJ5, Q4L8Y7, P9WIB5, Q56623, P19421, C4ZZ61, P9WQP2, Q45206, 085342, P31502, P25393, P0A669, 066251, C0Q3A8, Q49WH7, B4TNU5, P9WPS9, Q9ZH99, Q9A1S2, Q57301, P35635, B1JPZ8, Q06947, Q45209, P37753, P9WK65, P9WPE4, 052957, Q52938, A7ZTZ8, P9WIB4, Q8ZAE3, Q06972, A9WNAO, Q56127, Q06953, 088005, P37458, P31951, Q8FBQ3, P62586, AOQWU8, P15599, Q05868, P18481, B2TTZ8, Q79FW5, POAAA7, Q06981, Q48485, PODMDO, P37747, G4WJD3, Q1CBP1, A5U3Q3, A1JI79, P42216, P9WK75, 034194, P9WQN6, Q9JRN7, Q31UI9, P9WJQ1, A7MQI7, P15488, Q48481, P0DC91, P37785, P19422, B2K059, Q05862, A7FD60, P42217, POAOVO, P25734, P9WQN7, 083346, Q329X3, P9WJY7, A7ZTZ7, P11933, Q5L7M8, Q8DPY9, P68667, P60533, Q8ZAF1, 052956, Q8ZAF0, P0C7U7, P46733, POA5P3, P0A619, Q83DJ3, A1AHW2, POA5P9, Q8XAQ5, P04953, Q56872, Q2YKV1, Q2G1T6, 034191, Q6G2B4, P9WQN8, B7L8D5, A9R9H4, P9WK55, POA5N9, P9WG65, Q5HLV2, QOSYY5, P9W101, B5YY42, P19528, Q7BJX9, Q53107, Q2YW63, D3QY10, Q6G2B3, A1KQD8, B3FN88, A4TSQ1, P42218, P15598, P08180, Q4UNEO, Q1CBP0, P9WHW9, B5RFR0, Q00045, Q89ZXO, Q00474, Q8NUU9, P26879, Q9R3F2, Q83CP9, Q8Z397, Q9X6BO, Q7BHI8, P23033, Q03155, Q9AJ83, B614D0, POA5Q7, B2TTZ9, Q00046, A4Q8F7, P61711, Q45208, POA521, Q6FYW8, P94217, A8G842, P69957, P18010, P26194, 051401, Q52658, Q8ZAF2, Q81U45, Q31UJ0, P57039, Q8X7P7, P26397, Q47592, P9WPE6, P46815, P38016, B1XAG4, P69958, POCAX7, 032606, P58827, Q9AJ37, B7LU63, 033075, Q3YVG9, Q83E37, 031314, P26398, Q2SYH7, Q05433, AOR006, Q83E09, Q83IX5, P21207, P9WIP0, P9WIR0, P80069, Q9AJ79, QOTAS9, P9WIM8, P26880, P02970, 030511, P14168, G3XD01, P24251, B4TNU7, Q8VQ99, C6DHE4, P23995, P9WIP1, P9WIR1, P46842, Q9AJ77, Q8Z386, P9WIM9, P26881, P14190, C5WO22, P26402, P27829, POABW7, B7NTE9, P31631, Q66G05, P69960, POA5Q5, P9WIR3, P9WIR6, Q9AJ80, A9MJ15, P0C873, Q7ARC3, P14191, P18009, Q99191, P27832, P9WPH9, C4ZZ60, Q7A423, P27836, P15917, B2RHG2, P25732, Q48919, Q9AJ82, B5FN88, P68588, P37919, Q6E7F2, D2AJUO, P26400, B2K058, P9WJD8, B7MH59, Q6GED5, B7NFAO, P42502, B2RHG4, P9WIR2, Q9F9L1, Q9AJ63, Q5PKK7, P69966, P9WIZ7, P21982, A6QK59, Q50862, Q8XAQ8, P9WNK7, P45341, Q2FV55, POAC80, P23994, P9WIN8, P80200, Q9ZJD1, Q92JP8, Q8DVU8, POA5Y3, Q68X15, P52616, P99160, Q03584, B5YY41, POA565, QOTAT1, Q9KJT6, Q077R2, P42213, Q83A83, P55746, P56876, Q4UN15, Q1RJI4, P9WGT6, Q8YD01, P13253, P60158, Q83DP8, B7M5E1, P9WNK6, Q3YVG8, Q97PA9, Q57HS4, Q47334, Q03490, P16626, P37915, Q9ZD49, Q92ID4, Q81TU1, P9WKW3, P11764, Q4L980, Q56128, B1XAG5, Q6E7F1, B7NTE7, Q83AY0, A4WG18, Q8X8T4, P46841, P60532, Q04971, Q9AJ81, Q4UM04, P69965, P44067, 051941, Q5HCQ9, P26401, Q0TAT0, P9WIQ7, B7N288, P36429, B4SZ38, Q9S5G5, Q7MXKO, P07889, B9J2U2, Q92JF7, P13422, P31522, Q83CZ8, Q06969, Q7A2K6, Q48475, A4TRB5, A0A0H2VDN9, B7NF98, Q53782, A9MXG5, Q01410, Q48899, P09239, Q6HNU4, Q3L8P3, Q83DN9, P68589, P34001, Q06973, Q79ZW0, Q03583, Q66G06, P9WNK2, Q1R4E3, Q7A2K8, Q6CZF2, Q9ZN40, 085343, P42384, Q5HH69, POCl U6, P0AB36, P31527, Q48456, P05431, P18013, P26396, Q05032, P51836, Q9CNG8, Q99RX4, Q8Z388, P65301, A0Q4N6, Q00330, P76372, POA5P5, A4TRB4, P0A519, and P37741;
[2323] P87020, P43588, Q9UQY2, A6ZTR3, C5P230, Q1E3R8, B3STN5, Q4WMJ7, Q03392, Q08723, 013834, 094275, P20967, B2ZRS9, Q9XZV1, E9RCR4, P15873, Q9P7S2, P53549, E9CX44, 074531, P53119, Q95WA3, Q4WMJ1, POCB51, Q12377, P33298, P46589, 074783, P40985, Q95WA4, Q4WMJ9, Q59L12, P38204, 042931, Q1E8D2, Q09855, P24814, P00016, Q4WMJ8, G1UB63, Q03280, P41836, 074623, P87060, A4GYZO, P39940, Q4WMJ0, Q5AOX8, Q9UT05, 014250, 060022, Q5AB48, E9R9Y3, POCH07, Q9P3U4, Q59XX2, POCX83, 059770, Q9USX1, Q5F2J0, P46984, POCH09, P38199, P50142, 074440, Q10329, Q00746, 060182, Q4WMJ5, P38764, Q9USS7, Q00022, Q9US13, Q9UT97, P06104, Q5ABZ2, Q92211, P40016, Q1K9C4, Q03834, Q04062, P38624, 000103, POC7N7, Q04638, P38766, 060106, P25847, P87048, P25451, 000102, 074111, Q9US46, P35178, P38109, P25336, POCH06, P23724, P21734, Q8X082, Q5ALO3, P05759, Q10435, P32454, POCH08, Q12417, P52492, Q3E833, P40034, Q06103, P38202, P36049, QOC9L7, P21242, P15731, 014170, P36132, P53953, 014099, P53874, QOC9L6, Q9USQ9, POCG72, P25375, P38203, P38200, P34247, 042721, Q05583, P50086, Q08562, 094579, 074349, P52286, P38201, POCW95, P85437, P40303, Q09765, Q09682, Q04781, Q9Y709, 094264, Q12018, Q03071, 043063, P23566, 094393, P35728, P40482, Q10311, P38205, F2Z266, P25043, P38820, P40555, C5P3X6, P32565, 074549, 013959, Q5AMT2, Q01939, POCG63, Q92462, P53152, Q12250, 013685, P38630, 043069, P40302, 042646, Q09841, P29469, P38886, P22515, P38629, P38862, P30657, Q02159, P30656, P39014, P41878, P46595, Q08273, P53323, 014126, 094609, P33297, P33310, P50524, P33296, P23639, Q01532, P36612, P52490, P40327, P33311, P32496, Q99344, P32379, P07267, P23638, Q9P7R4, P33299, Q2UNX8, P20606, P52491, 074445, P00729, P18239, P28263, 094517, Q8TGEO, 094672, 074810, 074894, 013807, P37898, 013731, P21243, P36113, 074873, P15732, Q9UTG2, QOC9L4, 074762, P19812, Q09720, POCW94, Q9UUl5, Q07963, 014326, QOC9L5, 042897, P33202, P22141, O74983, P15303, P54860, 075004, 013790, Q10335, 060152, P30655, Q8TG42, POC8R3, Q5AJCO, Q03705, P15646, P40825, Q9C1X4, Q9Y7T8, Q9HFP8, Q01475, Q9UTN8, O94444, and Q9Y818;
[2324] A0A074T1L1, A0A0S4KF97, A0A0S4JQZ4, A0A0S4JAS1, A0A0S4J2H8, A0A0S4J8R3, A0A0S4IP92, A0A0S4IVI6, A0A074SMM4, A0A0S4JU95, A0A0S4JUU2, A0A0S4J2G0, A0A0S4JKP3, A0A0S4JNU2, A0A0S4J4S8, A0A0S4J1D6, A0A0S4JJ69, A0A0S4JQW3, A0A0S4KGR9, A0A0S4JOSO, A0A0S4IJQ6, A0A0S4J021, A0A0S4JLK8, A0A0S4JET1, A0A0S4IM54, A0A0S4JTM6, A0A0S4JEP5, A0A0S4IXR8, A0A0S4J1A6, A0A0S4IT85, A0A0S4JB95, A0A0S4IP11, A0A0S4JG58, A0A0S4J014, A0A0S4JAG3, A0A0S4JBV9, A0A0S4IMDO, A0A0S4KGC5, A0A0S4IKB9, A0A0S4JMF9, A0A0S4JJX3, A0A0S4IV8, A0A074TOF7, A0A0S4KMS7, A0A0S4IQ67, A0A0S4JAF7, A0A0S4J3C2, A0A0S4J897, A0A0S4J998, A0A0S4JAD5, A0A074SUM1, A0A0S4ITE7, A0A0S4IJN2, A0A0S4KHF9, A0A0S4J6W7, A0A0S4J872, A0A0S4JS05, A0A0S4JQZO, A0A074TVK6, B6DTN7, A0A0S4KLY4, A0A0S4JS11, A0A0S4J353, A0A0S4IXE4, A0A0S4J7G3, A0A0S4J4W4, A0A074TOB9, A0A0S4IXG7, A0A0S4IVU4, A0A0S4JB29, A0A0S4IIQ2, A0A0S4JB24, A0A0S4J5S1, A0A0S4IZD9, A0A074T0J3, A0A0S4JL29, A0A0S4IR72, A0A0S4JB58, A0A0S4JB16, A0A0S4IL58, A0A074STGO, A0A0S4JJQ5, A0A074T2W9, A0A0S4JBM4, A0A0S4IXS4, A0A0S4JXN2, A0A0S4ILC9, A0A0S4IW93, A0A0S4JIN3, A0A0S4KK21, A0A074TOJ7, A0A0S4JD35, A0A0S4IS00, A0A0S4JBS2, A0A0S4J5K3, A0A0S4J654, A0A0S4IJSO, A0A0S4J299, A0A074TCC9, A0A0S4J4B4, A0A0S4JON5, A0A0S4IRK3, A0A0S4JNX5, A0A0S4J9S4, A0A0S4JUB6, A0A0S4JDR2, A0A074T113, A0A0S4J954, A0A0S4KLL4, A0A0S4KEG2, A0A0S4J8T9, A0A0S4JJVO, A0A0S4JF82, A0A0S4J7H1, A0A074TWU5, A0A0S4JF41, A0A0S4JFAO, A0A0S4JS89, A0A0S4JE28, A0A0S4KFY6, A0A0S4J5C1, A0A0S4J603, A0A074T241, A0A0S4IL47, A0A0S4J985, A0A0S4IT79, A0A0S4JHS5, A0A0S4JCG7, A0A0S4KQ64, A0A0S4JQ27, A0A074SL18, A0A0S4J840, A0A0S4JIC5, A0A0S4KEN7, A0A0S4IPW7, A0A0S4IR61, A0A0S4IS67, A0A0S4IMD6, A0A074SV31, A0A0S4JEJ4, A0A0S4KIF1, A0A0S4JD68, A0A0S4JLCO, A0A0S4JTS4, A0A0S4JNW2, A0A0S4JRC8, A0A074SKW9, A0A0S4IZX6, A0A0S4JHEO, A0A0S4JT29, A0A0S4JSD2, A0A0S4J100, A0A0S4J3U1, A0A0S4IMY9, A0A0S4JMU5, A0A0S4J9N3, A0A0S4IVH1, A0A0S4JQW5, A0A0S4IS12, A0A0S4JAQ6, A0A0S4JC49, A0A0S4JDY8, A0A0S4JN05, A0A0S4ILK6, A0A0S4JHG5, A0A0S4KGV4, A0A0S4J515, A0A0S4IQA7, A0A0S4IV27, A0A0S4JAM9, A0A0S4JJG5, A0A0S4JQB6, A0A0S4JLH4, A0A0S4IVN7, A0A0S4JEZ5, A0A0S4IM08, A0A0S4IH88, A0A0S4JLB2, A0A0S4JEE7, A0A0S4IVX6, A0A0S4IU55, A0A0S4IN83, A0A0S4IZ03, A0A0S4IVV6, A0A0S4KEL3, A0A0S4ISG8, A0A0S4JV10, A0A0S4IIK7, A0A0S4JC54, A0A0S4IKB3, A0A0S4J7S2, A0A0S4JD74, A0A0S4JQ06, A0A0S4J746, A0A0S4JA77, A0A0S4JF29, A0A0S4JAE3, A0A0S4JFY5, A0A0S4JMQ7, A0A0S4J7Q5, A0A0S4J1U3, A0A0S4KK93, A0A0S4IHU9, A0A0S4J2L4, A0A0S4ITD5, A0A0S4JTQ7, A0A0S4JP32, A0A0S4IWS5, A0A0S4JB17, A0A0S4ILT2, A0A0S4JLL8, A0A0S4JDS1, A0A0S4JBL4, A0A0S4JU85, A0A0S4JRD7, A0A0S4J2K2, A0A0S4IU91, A0A0S4IXT3, A0A0S4KJT6, A0A0S4JFC9, A0A0S4JNK9, A0A0S4JV99, A0A0S4JVN7, A0A0S4J113, A0A0S4JAQ3, A0A0S4IXN5, A0A0S4ILX2, A0A0S4IQE4, A0A0S4KF94, A0A0S4JEZ2, A0A0S4IK14, A0A0S4KEC2, A0A0S4JE78, A0A0S4IND6, A0A0S4J3T7, A0A0S4JTK3, A0A0S4JJFO, A0A0S4IMBO, A0A0S4JL12, A0A0S4IQP3, A0A0S4JV52, A0A0S4ITN5, A0A0S4J2M0, A0A0S4IX99, A0A0S4J6B1, A0A0S4JOU7, A0A0S4IMZO, A0A0S4J7H0, A0A0S4JF05, A0A0S4JGN7, A0A0S4KK37, A0A0S4JDTO, A0A0S4JS26, A0A0S4JD14, A0A0S4ITR1, A0A0S4JOH7, A0A0S4J260, A0A0S4JWD6, A0A0S4J8Q8, A0A0S4JE04, A0A0S4JNM8, A0A0S4J7L5, A0A0S4JP43, A0A0S4J3A2, A0A0S4IXY3, A0A0S4J419, A0A0S4JOZO, A0A0S4IY44, A0A0S4JRN5, A0A0S4KHD7, A0A0S4JOFO, A0A0S4J4L7, A0A0S4J539, A0A0S4J3Q1, A0A0S4J542, A0A0S4IL46, A0A0S4KL26, A0A0S4JEG7, A0A0S4JVS2, A0A0S4KP55, A0A0S4J0G9, A0A0S4JJ63, A0A0S4IP14, A0A0S4J8P6, A0A0S4J2R4, A0A0S4J761, A0A0S4IJN8, A0A0S4JSG5, A0A0S4IP99, A0A0S4JHM1, A0A0S4IN27, A0A0S4KEC0, A0A0S4JSC5, A0A0S4J4G2, A0A0S4JAN4, A0A0S4JEP2, A0A0S4J9M5, A0A0S4ISU4, A0A0S4J604, A0A0S4ILR7, A0A0S4JGL5, A0A0S4JOKO, A0A0S4JSB8, A0A0S4JLZO, A0A0S4JOQ7, A0A0S4IVU5, A0A0S4J1U5, A0A0S4IQP4, A0A0S4IT62, A0A0S4JUR5, A0A0S4IU73, A0A0S4J6BO, A0A0S4JCX5, A0A0S4JCT9, A0A0S4J2U8, A0A0S4KJA7, A0A0S4J8U4, A0A0S4JS12, A0A0S4JWB3, A0A0S4ISN8, A0A0S4JDX7, A0A0S4J592, A0A0S4IU40, A0A0S4IJ71, A0A0S4J3B3, A0A0S4JCC6, A0A0S4JAU0, A0A0S4J360, A0A0S4JG36, A0A0S4JNL2, A0A0S4IWB9, A0A0S4J805, A0A0S4JMGO, A0A0S4JG17, A0A0S4J206, A0A0S4J4C3, A0A0S4ILW5, A0A0S4KIB1, A0A0S4JZB5, A0A0S4IR85, A0A0S4IVQ8, A0A0S4JSH3, A0A0S4KIR5, A0A0S4JK76, A0A0S4IZC7, A0A0S4JSA1, A0A0S4JJG7, A0A0S4IMS3, A0A0S4IY39, A0A0S4IWU0, A0A0S4J4P0, A0A0S4JEG9, A0A0S4IW61, A0A0S4ITN3, A0A0S4J2P7, A0A0S4IS4I, A0A0S4KMV2, A0A0S4J278, A0A0S4JVZ3, A0A0S4JU20, A0A0S4JPM5, A0A0S4IRQ2, A0A0S4JTY6, A0A0S4J814, A0A0S4J2V2, A0A0S4IVC7, A0A0S4IZW2, A0A0S4JH12, A0A0S4JU35, A0A0S4J6M1, A0A0S4JMU7, A0A0S4JLM8, A0A0S4JMV1, A0A0S4JEK1, A0A0S4J5X0, A0A0S4JL76, A0A0S4JJI3, A0A0S4JPN6, A0A0S4J254, A0A0S4IQ0, A0A0S4KK75, A0A0S4JEXO, A0A0S4JEH8, A0A0S4IV96, A0A0S4JFV3, A0A0S4IZX5, A0A0S4KIT5, A0A0S4JAW7, A0A0S4IIS0, A0A0S4J5A0, A0A0S4KHE4, and A0A0S4IUK8;
[2325] B6KAMO, P90661, Q81E47, P14593, P18269, Q4U9M9, P23253, P13826, P50498, P04934, P13828, P13814, P50490, P19597, P02897, P02890, P09792, Q02752, P18270, P06914, P15714, P08569, P68874, P06016, P08515, Q8MZJ8, P15964, P08676, P22622, P08677, Q25540, P02892, P87020, P42665, P18271, P13815, P20287, 096175, P35661, P08418, P29030, P62884, P67877, Q07828, P50491, C6KTB7, P04926, P02894, Q9TY95, Q5F2J0, Q03400, P08675, Q95WA4, Q9F9F2, P35666, Q9AJ37, Q81E95, P09841, Q95WA3, P04922, P50492, P08672, Q05870, P05691, Q25619, P26332, Q03994, P08673, P19260, P06015, P31008, P17503, P16445, P02893, P67878, P15744, Q9XZV1, P08307, P21849, P32072, P69192, P22545, Q815D2, P08674, P14223, Q4UNEO, P61074, Q4FX73, P22621, P26694, P54190, Q25306, P13399, Q01443, P02898, Q4UM04, P81860, Q81KW2, P26624, P06915, P50489, Q4UN15, Q7KQM2, P02891, B6KV60, Q03110, P21303, P62883, B3STN5, and P23093;
[2326] P04156; and

[2327] Amyloid β peptide (AR; P05067), Tau (P10636), α-Synuclein (P37840), Fused in sarcoma (FUS) protein (P35637), Superoxide dismutase (P00441), TDP-43 (Q13148), C90RF72 (Q96LT7), ubiquilin-2 (UBQLN2) (Q9UHD9), Huntingtin (P42858), ABri (Q9Y287), Cystatin C (P01034), Notch3 (Q9UM47), Glial fibrillary acidic protein (GFAP; P14136), Seipin (Q96G97), Transthyretin (P02766), Serpins (P01009 & others), immunoglobulin light chains (P01834 & others), Immunoglobulin heavy chains (P01857 & others), Amyloid A protein (PODJI8), Islet amyloid polypeptide (amylin; P10997), Medin (lactadherin; Q08431), Apolipoprotein AI (P02647), Apolipoprotein AII (P02652), Apolipoprotein AIV (P06727), Gelsolin (P06396), Lysozyme (P61626), Fibrinogen (P02671, P02675), Beta-2 microglobulin (P61769), Crystallins (P02489 & others), Rhodopsin (P08100), Calcitonin (P01258), Atrial natriuretic factor (P01160), Prolactin (P01236), Keratoepithelin (Q15582), Keratins (Q14533 & others), Keratin intermediate filament proteins (P35908 & others), Lactoferrin (P02788), Surfactant protein C (SP-C) (P11686), Odontogenic ameloblast-associated protein (A1E959), Semenogelin I (P04279), Apolipoprotein C2 (ApoC2) (P02655), Apolipoprotein C3 (ApoC3) (P02656), Leukocyte chemotactic factor-2 (Lect2) (014960), Insulin (P01308), Galectin-7 (Gal7) (P47929), Corneodesmosin (Q15517), and CFTR protein (P13569).

[2328] 22. The method of any one of statements 1 to 21, wherein the subject has, is suspected of having, has been diagnosed with, or is at risk of, a disorder characterized by a disorder-associated antigen (DAA).

[2329] 23. The method of any one of statements 1 to 22, wherein the subject has been selected for treatment on the basis that the subject has, is suspected of having, has been diagnosed with, or is at risk of, a disorder characterized by a disorder-associated antigen (DAA).

[2330] 24. The method of any one of statements 1 to 23, comprising the steps of:
[2331] (i) selecting the subject for treatment on the basis that the subject has, is suspected of having, has been diagnosed with, or is at risk of, a disorder characterized by a disorder-associated antigen (DAA);
[2332] (ii) administering the CD25-ADC to the subject.

[2333] 25. The method of any one of statements 6 to 24, wherein the disorder is a pathogen-associated disorder, or a proliferative disorder such as cancer.

[2334] 26. The method of statement 25, wherein the proliferative disorder or cancer is a solid tumour.

[2335] 27. The method of statement 26, wherein the solid tumour is an established tumour.

[2336] 28. The method of statement 27, wherein the establised tumour is a tumour diagnosed or identified in a naïve subject.

[2337] 29. The method of statement 27, wherein the establised tumour is a relapsed tumour.

[2338] 30. The method of statement 26, wherein the solid tumour is a metastatic tumour.

[2339] 31. The method of statement 26, wherein the solid tumour comprises or consists of CD25-ve neoplastic cells.

[2340] 32. The method of any one of statements 25 to 31, wherein the solid tumour is associated with CD25+ve infiltrating cells;
[2341] optionally wherein the solid tumour is associated with high levels of CD25+ve infiltrating cells.

[2342] 33. The method of statement 32, wherein the solid tumour is selected from the group consisting of pancreatic cancer, breast cancer (including triple negative breast cancer), colorectal cancer, gastric and oesophageal cancer, melanoma, non-small cell lung cancer, ovarian cancer, hepatocellular carcinoma, renal cell carcinoma, bladder, and head and neck cancer.

[2343] 34. The method of statement 31, wherein the solid tumour is associated with low levels of CD25+ve infiltrating cells.

[2344] 35. The method of any one of statements 25 to 31, wherein the solid tumour is not associated with CD25+ve infiltrating cells.

[2345] 36. The method of statement 25, wherein the proliferative disorder or cancer is lymphoma or leukaemia.

[2346] 37. The method of statement 36, wherein the proliferative disorder or cancer is selected from:
[2347] Hodgkin's Lymphoma;
[2348] non-Hodgkin's, including diffuse large B-cell lymphoma (DLBCL), follicular lymphoma, (FL), Mantle Cell lymphoma (MCL), chronic lymphatic lymphoma (CLL) Marginal Zone B-cell lymphoma (MZBL); and
[2349] leukemias, including Hairy cell leukemia (HCL), Hairy cell leukemia variant (HCL-v), Acute Myeloid Leukaemia (AML), and Acute Lymphoblastic Leukaemia (ALL) such as Philadelphia chromosome-positive ALL (Ph+ALL) or Philadelphia chromosome-negative ALL (Ph-ALL).

[2350] 38. The method of any one of statements 25, 36, or 37, wherein the proliferative disorder or cancer is associated with elevated levels of regulatory immune cells, such as Treg cells.

[2351] 39. The method of statements 38, wherein the proliferative disorder or cancer is chronic lymphatic lymphoma (CLL), T-cell Acute Lymphoblastic Leukaemia (T-ALL), and B-cell non-Hodgkin's Lymphoma.

[2352] 40. The method any one of statements 36 to 39, wherein the proliferative disorder or cancer is AML.

[2353] 41. The method of statement 25, wherein the proliferative disorder or cancer is a circulating tumour or circulating tumour cells.

[2354] 42. The method of statement 41, wherein the circulating tumour or circulating tumour cells are, or comprise, metastatic cells.

[2355] 43. The method of either one of statements 41 or 42, wherein the subjects are:
[2356] a) subjects who have, are suspected of having, have been diagnosed with a primary tumour with metastatic characteristics, such as high-metastatic prognosis or elevated expression of one or more biomarkers of metastatic cancer;
[2357] b) subjects who have, are suspected of having, have been diagnosed with one or more metastatic tumours;
[2358] c) pre-operative or post-operative subjects, wherein the operation is to remove part or all of a solid tumour. Typically, selected pre-operative or post-operative subjects start their treatment not more than 4 weeks from the operation date, such as not more than 2 weeks, or not more than 1 week.

[2359] 44. The method of statement 25, wherein the pathogen-associated disorder is viral, bacterial, fungal, protozoan, parasitical, prion, or protein aggregate.

[2360] 45. The method of either one of statement 25 or 44, wherein the pathogen-associated disorder is selected from:
[2361] Adenovirus infection, HIV/AIDS, Alphavirus Encephalitis, Arenavirus, Argentine hemorrhagic fever, Arthropod-borne viral encephalitis, Avian Influenza, Bolivian Hemorrhagic Fever, Borna disease, Chickenpox, Chikungunya, Coxsackievirus Infection, Crimean-Congo Hemorrhagic Fever, Cytomegalovirus infection, Dengue fever, Eastern equine encephalitis, Ebola, Echovirus Infection, Epstein-Barr Virus infection, Epstein-Barr Virus Related Tumours, Fifth Disease, Filovirus, Flavivirus, German measles, Hand, foot & mouth disease, Hemorrhagic fever with renal syndrome, Herpes Virus (Herpesviridae) infection, Herpes Simplex Virus Infection, Herpes Zoster Virus, Human Papilloma Virus Associated Epidermal Lesions, Human Papilloma Virus related Cervical Cancer, Mononucleosis, Influenza, Japanese Encephalitis, Kaposi Sarcoma, Korean Hemorrhagic Fever, Kyasanur Forest Disease, Lassa Fever, Lymphocytic choriomeningitis, Marburg Virus Disease, Measles, Molluscum Contagiosum, Mumps, Murray Valley encephalitis, Norwalk Virus related Diarrhea, Omsk hemorrhagic fever, Orthomyxoviruses, Parainfluenza Virus Infection, Paramyxovirus, Parvovirus B19 Infection, Picornavirus, Poxviruses, Rabies, Respiratory syncytial virus infection, Rift Valley Fever, Rotavirus diarrhea, Rubella, Rubeola, Smallpox, St. Louis Encephalitis, Tick-borne Encephalitis, Varicella, Variola, Venezuelan equine encephalitis, Viral hemorrhagic fevers, Western equine encephalitis, West Nile Virus disease, Yellow Fever, and Zika;
[2362] Actinomycosis, Acute prostatitis, Anaerobic infection, Bacillary peliosis, Bacteremia, Bacterial pneumonia, Bacteroides ureolyticus, Baggio-Yoshinari syndrome, Barcoo fever, Bartonellosis, Biliary fever, Botryomycosis, Bovine campylobacteriosis, Brazilian purpuric fever, Brazilian Purpuric Fever, Brodie abscess, Burkholderia cepacia complex, Buruli ulcer, Campylobacteriosis, Capnocytophaga canimorsus, Cariogram, Carrion's disease, Chlamydia suis, Cholera, bacterial prostatitis, osteomyelitis, endodontic lesions, bovine pleuropneumonia, dermatitis, Diphtheria, Diphtheritic stomatitis, Epidural abscess, Epiglottitis, Erysipelas, Legionaires' disease, Far East scarlet-like fever, Fitz-Hugh-Curtis syndrome, Foot rot, Gardnerella vaginalis, Garre's sclerosing osteomyelitis, Granuloma inguinale, Haemophilus meningitis, monocytotropic ehrlichiosis, Lemierre's syndrome, Leprosy, Listeriosis, Lyme disease, Meningococcal disease, Mycobacterium avium-intracellulare infection, Necrotizing fasciitis, Nocardiosis, Noma, Omphalitis, Orbital cellulitis, Periodontal abscess, Periorbital cellulitis, Peritonsillar abscess, Pott disease, Proctitis, Pseudomonas infection, Psittacosis, Pyaemia, Pyomyositis, Q fever, Retropharyngeal abscess, Salmonellosis, Serratia infection, Shigellosis, Southern tick-associated rash illness, Staphylococcal scalded skin syndrome, brucellosis, Syphilis, Tetanus, Toxic shock syndrome, Trench fever, Tropical ulcer, Tubo-ovarian abscess, Ureaplasma urealyticum infection, Tuberculosis, Vertebral osteomyelitis, Waterhouse-Friderichsen syndrome, Whooping cough, Xanthogranulomatous osteomyelitis, and Yersiniosis;
[2363] Aspergillosis, Candidiasis, Coccidioidomycosis, Cryptococcus gattil infection, onychomycosis, microsporidiosis, mucormycosis, pneumocystis pneumonia, sporotrichosis, blastomycosis, Candida auris infection, Cryptococcus neoformans infection, fungal eye infection including keratitis and endophthalmitis, Histoplasmosis, mycetoma, dermatophytosis inc. tinea pedis tinea corporis, and talaromycosis;
[2364] Acanthamoeba keratitis, African trypanosomiasis, Avian malaria, Babesiosis, Besnoitiosis, Blastocystosis, Chagas disease, Cryptosporidiosis, Cyclosporiasis, Dientamoebiasis, Giardiasis, Histomoniasis, Malaria, Premunity, Sappinia amoebic encephalitis, Surra, Toxoplasmosis, Trichomoniasis, and Trypanosomiasis;
[2365] Echinococcosis, Amebiasis, Ancylostomiasis, Angiostrongyliasis, Anisakiasis, Ascariasis, Balantidiasis, Granulomatous Amebic Encephalitis, Baylisascariasis, Schistosomiasis, Capillariasis, Clonorchiasis, Cysticercosis, Diphyllobothriasis, Filariasis, Enterobiasis, Fascioliasis, Fasciolopsiasis, gnathostomiasis, Heterophyiasis, Hymenolepiasis, Leishmaniasis, Opisthorchiasis, Loiasis, Onchocerciasis, Paragonimiasis, Sarcocystosis, Taeniasis, Toxocariasis, Trichinellosis, and Trichuriasis;
[2366] Creutzfeldt-Jakob disease (CJD) including iatrogenic, variant, familial, and sporadic sub-types, fatal familial insomnia (FFI), Gertsmann-Straussler-Scheinker syndrome (GSS), kuru, and variably protease-sensitive prionopathy (VPSPr);
[2367] Alzheimer's disease, Cerebral p-amyloid angiopathy, Retinal ganglion cell degeneration in glaucoma, Parkinson's disease and other synucleinopathies, Tauopathies, Frontotemporal lobar degeneration, FTLD-FUS, Amyotrophic lateral sclerosis (ALS), Huntington's disease, Familial British dementia, Familial Danish dementia, Hereditary cerebral hemorrhage with amyloidosis, CADASIL, Alexander disease, Seipinopathies, Familial amyloidotic neuropathy, Senile systemic amyloidosis, Serpinopathies, AL amyloidosis, AH amyloidosis, AA amyloidosis, Type II diabetes, Aortic medial amyloidosis, ApoAl amyloidosis, ApoAll amyloidosis, ApoAIV amyloidosis, Familial amyloidosis of the Finnish type (FAF), Lysozyme amyloidosis, Fibrinogen amyloidosis, Dialysis amyloidosis, Inclusion body myositis/myopathy, Cat Retinitis pigmentosa with rhodopsin mutations, Medullary thyroid carcinoma, Cardiac atrial amyloidosis, Pituitary prolactinoma, Hereditary lattice corneal dystrophy, Cutaneous lichen amyloidosis, Mallory bodies, Multiple System Atrophy, Corneal lactoferrin amyloidosis, Pulmonary alveolar proteinosis, Odontogenic (Pindborg) tumor amyloid, Seminal vesicle amyloid, Apolipoprotein C2 amyloidosis, Apolipoprotein C3 amyloidosis, Lect2 amyloidosis, Insulin amyloidosis, Galectin-7 amyloidosis (primary localized cutaneous amyloidosis), Corneodesmosin amyloidosis, Enfuvirtide amyloidosis, Cystic fibrosis, and Sickle cell disease.

[2368] 46. The method of any one of statements 1 to 45, wherein the subject has received an adoptive cell transfer.

[2369] 47. The method of any one of statements 1 to 46, wherein the subject has been selected for treatment on the basis that the subject has received an adoptive cell transfer.

[2370] 48. The method of any one of statements 1 to 47, comprising the steps of:
[2371] (i) selecting the subject for treatment on the basis that the subject has received an adoptive cell transfer;
[2372] (ii) administering the CD25-ADC to the subject.

[2373] 49. The method of any one of statements 46 to 48, wherein the adoptive cell transfer is a bone marrow transplant.

[2374] 50. The method of any one of statements 46 to 49, wherein the adoptive cell transfer is an autologous cell transfer.

[2375] 51. The method of any one of statements 46 to 49, wherein the adoptive cell transfer is an allogenic cell transfer.

[2376] 52. The method of any one of statements 46 to 51, wherein the adoptive cell transfer is a stem cell transfer.

[2377] 53. The method of any one of statements 46 to 52, wherein the adoptive cell transfer is an immune cell transfer.

[2378] 54. The method of any one of statements 46 to 53, wherein the subject received the adoptive cell transfer at least 3 months prior to the administration of the CD25-ADC, such as at least 6 months, at least 12 months, at least 18 months, or at least 24 months prior to the administration of the CD25-ADC.

[2379] 55. The method of any one of statements 46 to 54, wherein the CD25-ADC is administered in a QW dosage regime.

[2380] 56. The method of any one of statements 46 to 55, wherein the dose of CD25-ADC administered is 10, 20, 25, 27.5, 30, 32.5, 35, 37.5, 40, 42.5, 45, 47.5, 50, 55, 60, 65, 70, 75, or 80 μg/kg.

[2381] 57. The method of any one of statements 1 to 7 or 22 to 56, wherein the CD25-ADC is administered in combination with a cell therapy.

[2382] 58. The method of statement 57, wherein the CD25-ADC is administered before the cell therapy;
[2383] ptionally wherein the CD25-ADC is administered 1 day, 2 days, 3 days, 4 days, 5 days, 6 days, 7 days, 8 days, 9 days, 10 days, 11 days, 12 days, 13 days, or 14 days before the cell therapy.

[2384] 59. The method of either one of statements 57 or 58, wherein the immune-suppressive activity of a population of regulatory immune cells in the subject is reduced by at least 90% before the cell therapy is administered.

[2385] 60. The method of any one of statements 57 to 59, wherein the size of a population of regulatory immune cells in the subject is reduced by at least 90% before the cell therapy is administered.

[2386] 61. The method of statement 60, wherein the regulatory immune cells are Treg cells.

[2387] 62. The method of statement 57, wherein the CD25-ADC is administered concomitantly with the cell therapy.

[2388] 63. The method of any one of statements 57 to 62, wherein the cell therapy comprises the administration of autologous cells.

[2389] 64. The method of any one of statements 57 to 62, wherein the cell therapy comprises the administration of allogenic cells.

[2390] 65. The method of any one of statements 57 to 64, wherein the cell therapy comprises the administration of stem cells.

[2391] 66. The method of any one of statements 57 to 65, wherein the cell therapy comprises the administration of immune cells.

[2392] 67. The method of statement 66, wherein the immune cells are T-cells, Natural Killer (NK) cells, Natural Killer T-cell (NKT), Lymphokine-activated Killer (LAK) cells, or macrophages.

[2393] 68. The method of either one of statements 63 or 67, wherein the immune cells express a chimeric antigen receptor (CAR).

[2394] 69. The method of any one of statements 57 to 68, wherein the cell therapy comprises the administration of CAR T-cells.

[2395] 70. The method of statement 69, wherein the CAR T-cell is a 1^{st} generation CAR T-cell, a 2^{nd} generation CAR T-cell, a 3^{rd} generation CAR T-cell, a 4^{th} generation CAR T-cell, a TRUCK, a smart CAR, or an iCAR.

[2396] 71. A method of treating a disorder a subject, wherein the disorder is characterized by a disorder-associated antigen (DAA), the method comprising administering a CD25-ADC to the subject, wherein the subject:
[2397] (i) has received an adoptive cell transfer; or
[2398] (ii) has been selected for treatment on the basis they have received an adoptive cell transfer.

[2399] 72. The method of statement 71 further comprising the step of selecting the subject for treatment on the basis that the subject has received an adoptive cell transfer.

[2400] 73. The method of either one of statement 71 and 72, wherein the disorder is as defined in any one of statements 24 to 37.

[2401] 74. The method of any one of statements 71 to 73, wherein the adoptive cell transfer is as defined in any one of statements 41 to 45.

[2402] 75. The method of any one of statements 71 to 74, wherein the subject received the adoptive cell transfer at least 3 months prior to the administration of the CD25-ADC, such as at least 6 months, at least 12 months, at least 18 months, or at least 24 months prior to the administration of the CD25-ADC.

[2403] 76. The method of any one of statements 71 to75, wherein the CD25-ADC is administered in a QW dosage regime.

[2404] 77. The method of any one of statements 71 to 76, wherein the dose of CD25-ADC administered is 10, 20, 25, 27.5, 30, 32.5, 35, 37.5, 40, 42.5, 45, 47.5, 50, 55, 60, 65, 70, 75, or 80 μg/kg.

[2405] 78. A method of enhancing the efficacy of cell therapy in a subject, the method comprising administering the cell therapy in combination with a CD25-ADC.

[2406] 79. A method of treating a disorder a subject, wherein the disorder is characterized by a disorder-associated antigen (DAA), the method comprising administering a CD25-ADC to the subject in combination with cell therapy.

[2407] 80. The method of statement 79, wherein the disorder is as defined in any one of statements 25 to 45.

[2408] 81. The method of any one of statements 78 to 80, wherein the CD25-ADC is administered before the cell therapy.

[2409] 82. The method of any one of statements 78 to 81, wherein the immune-suppressive activity of a population of regulatory immune cells in the subject is reduced by at least 90% before the cell therapy is administered.

[2410] 83. The method of any one of statements 78 to 82, wherein the size of a population of regulatory immune cells in the subject is reduced by at least 90% before the DAA or vaccine composition is administered.

[2411] 84. The method of statement 83, wherein the regulatory immune cells are Treg cells.

[2412] 85. The method of any one of statements 78 to 80, wherein the CD25-ADC is administered concomitantly with the cell therapy.

[2413] 86. The method of any one of statements 78 to 85, wherein the cell therapy is as defined in any one of statements 63 to 70.

[2414] 87. A method of selecting a subject as suitable for treatment with a CD25-ADC, the method comprising the steps of:
[2415] (a) identifying a subject who:
   [2416] (i) has, is suspected of having, has been diagnosed with, or is at risk of, a disorder characterized by a disorder-associated antigen (DAA), and/or
   [2417] (ii) has received an adoptive cell transfer, and/or
   [2418] (iii) has been selected for treatment with cell therapy; and
[2419] (b) selecting the subject for treatment with the CD25-ADC.

[2420] 88. The method of statement 87, wherein the disorder is as defined in any one of statements 25 to 46.

[2421] 89. The method of either one of statements 87 or 88, wherein the adoptive cell transfer is as defined in any one of statements 49 to 53.

[2422] 90. The method of any one of statements 87 to 89, wherein the subject received the adoptive cell transfer at least 3 months prior to the administration of the CD25-ADC, such as at least 6 months, at least 12 months, at least 18 months, or at least 24 months prior to the administration of the CD25-ADC.

[2423] 91. The method of any one of statements 87 to 90, wherein the cell therapy is as defined in any one of statements 63 to 70.

[2424] 92. The method of any one of statements 1 to 91, wherein the CD25-ADC is administered in combination with a checkpoint inhibitor or other immunostimulatory agent.

[2425] 93. The method of statement 92, wherein the CD25-ADC may be administered before the checkpoint inhibitor or other immunostimulatory agent, simultaneous with the checkpoint inhibitor or other immunostimulatory agent, or after the checkpoint inhibitor or other immunostimulatory agent.

[2426] 94. The method of either one of paragraphs 92 or 93, wherein the checkpoint inhibitor is a PD1 antagonist.

[2427] 95. The method of paragraph 94, wherein the PD1 antagonist is selected from pembrolizumab, nivolumab, MED10680, PDR001 (spartalizumab), Camrelizumab, AUNP12, Pidilizumab Cemiplimab (REGN-2810), AMP-224, BGB-A317 (Tisleizumab), and BGB-108.

[2428] 96. The method of either one of paragraphs 92 or 93, wherein the checkpoint inhibitor is a PD-L1 antagonist.

[2429] 97. The method of paragraph 96, wherein the PD-L1 antagonist is selected from atezolizumab (Tecentriq), BMS-936559/MDX-1105, durvalumab/MED14736, and MSB0010718C (Avelumab).

[2430] 98. The method of either one of paragraphs 92 or 93, wherein the checkpoint inhibitor is a GITR (Glucocorticoid-Induced TNFR-Related protein) agonist.

[2431] 99. The method of paragraph 98, wherein the GITR (Glucocorticoid-Induced TNFR-Related protein) agonist is selected from MED11873, TRX518, GWN323, MK-1248, MK 4166, BMS-986156 and INCAGN1876.

[2432] 100. The method of either one of paragraphs 92 or 93, wherein the checkpoint inhibitor is an OX40 agonist.

[2433] 101. The method of paragraph 100, wherein the OX40 agonist is selected from MED10562, MED16383, MOXR0916, RG7888, OX40mAb24, INCAGN1949, GSK3174998, and PF-04518600.

[2434] 102. The method of either one of paragraphs 92 or 93, wherein the checkpoint inhibitor is a CTLA-4 antagonist.

[2435] 103. The method of paragraph 102, wherein the CTLA-4 antagonist is selected from ipilimumab and Tremelimumab.

[2436] 104. The method of either one of paragraphs 92 or 93, wherein the other immunostimulatory agent is a bi-specific T-cell engager (BiTE).

[2437] 105. The method of paragraph 104, wherein the BiTE specifically binds CD3.

[2438] 106. The method of either one of paragraphs 104 or 105, wherein the BiTE specifically binds the DAA.

[2439] 107. The method of any one of statements 1 to 106, wherein the CD25-ADC is administered in combination with radiotherapy.

[2440] 108. The method of statement 107, wherein the CD25-ADC may be administered before the radiotherapy, simultaneous with the radiotherapy, or after the radiotherapy.

[2441] 109. The method of either one of paragraphs 107 or 108, wherein the radiotherapy is selected from the group consisting of: external beam radiotherapy, stereotactic radiation therapy, Intensity-Modulated Radiation Therapy, particle therapy, brachytherapy, delivery of radioisotopes, intraoperative radiotherapy, Auger therapy, Volumetric modulated arc therapy, Virtual simulation, 3-dimensional conformal radiation therapy, and intensity-modulated radiation therapy.

[2442] 110. The method of any one of paragraphs 107 to 109, wherein each radiotherapy dose is no greater than 18 Gy.

[2443] 111. The method of any one of paragraphs 107 to 110, wherein each radiotherapy dose is no greater than 12 Gy.

[2444] 112. The method of any one of paragraphs 107 to 111, wherein the total radiotherapy dose is no greater than 18 Gy.

[2445] 113. The method of any one of paragraphs 107 to 112, wherein the total radiotherapy dose is no greater than 12 Gy.

[2446] 114. The method of any one of statements 1 to 113, wherein the CD25-ADC is as defined herein in paragraphs 1-110 of the section entitled “CD25-ADCs”.

[2447] 115. The method of any one of statements 1 to 114, wherein the CD25-ADC is ADCx25.

[2448] 116. The method of any one of statements 1 to 114, wherein the CD25-ADC is ADCT-301.

[2449] 117. The method of any one of statements 1 to 114, wherein the CD25-ADC is Camidanlumab Tesirine.

[2450] 118. An antibody-drug conjugate compound as defined in any one of statements 1 to 112 for use in a method of any one of statements 1 to 86 or 92 to 117.

[2451] 119. A composition or pharmaceutical composition comprising an antibody-drug conjugate compound as defined in any one of statements 1 to 117 for use in a method of any one of statements 1 to 86 or 92 to 117.

[2452] 120. Use of an antibody-drug conjugate compound as defined in any one of statements 1 to 112 in the preparation of a medicament for use in a method of any one of statements 1 to 86 or 92 to 117.

### EXAMPLES

### Example 1

[2453] In Vivo Efficacy Study of Surrogate-ADCx25 in an Immuno-Competent Syngeneic Mouse Model Using Mouse Colon Cancer MC38 Cells.

[2454] Introduction

[2455] MC38 is a CD25-ve mouse colon cancer-derived model used pre-clinically in immunotherapy-type studies which is known to have infiltration of Treg and Teff cells.

[2456] In Arce Vargas et al., 2017, Immunity 46, 1-10, Apr. 18, 2017 (http://dx.doi.org/10.1016/i.immuni.2017.03.013) selective depletion of tumor infiltrating Treg cells in the MC38 model was shown using an Fc enhanced version of PC61, a rat antibody directed against mouse CD25 and synergy with PD1 was described. The wild-type PC61 was conjugated to the PBD dimer drug-linker SG3249 (the PBD drug-linker used in ADCx25/ADCT-301/Camidanlumab Tesirine) and designated as Surrogate-ADCx25 (or SurADCx25). The efficacy of Surrogate-ADCx25 was studied as monotherapy or in combination with anti-PD1 (Anti-PD1, clone RPM1-14, BioXcell cat#BE0146) in the MC38 syngeneic mouse model.

[2457] Study Design

[2458] Female C57BL/6 mice (C57BL/6NCrl, Charles River) were nine weeks old on Day 1 of the study and had a body weight (BW) range of 17.8 to 24.2 g. At the completion of the initial study described in this example, tumor-free survivors were transferred to a secondary rechallenge study, described in Example 3.

[2459] On the day of implant 5×10⁵ MC38 cells (0.1 mL suspension) were subcutaneously implanted into the right flank of each test animal. Tumors were monitored as their volumes approached the target range of 80-120 mm³. Fifteen days after tumor cell implantation, on Day 1 of the study, animals were sorted into ten groups (n=10/group) with individual tumor volumes of 63 to 172 mm3, and group mean tumor volumes of 103-172 mm3.

[2460] All doses were administered intraperitoneally (i.p.) on Day 1 except for anti-PD-1 which was administered once on Days 2, 5, 8. The dosing volume was 0.2 mL per 20 grams of body weight (10 mL/kg), and was scaled to the body weight of each individual animal. Tumors were measured twice per week until the study was ended on Day 59. Each animal was euthanized when its tumor attained the endpoint tumor volume of 1000 mm3 or on the final day, whichever came first.

[2461] Surrogate-ADCx25 was administered intraperitoneally (i.p.) as single dose (0.1, 0.5 and 1 mg/kg) on day 1 either alone or in combination with anti-PD1 antibody (given at standard dosing regime, i.e. 5 mg/kg at day 2, 5 and 8). As a control, Isotype Control ADC (B12-SG3249) was administered as single dose (1 mg/kg) on day 1 either alone or in combination 45 with anti-PD1 antibody (given at standard dosing regime), while anti-PD1 antibody was administered alone at standard dosing regimen.

[2462] Tumors were measured in two dimensions using calipers, and volume was calculated using the formula:

Tumor Volume (mm³)=w²×l/2, where w=width and l=length,in mm, of the tumor.

[2463] Tumor weight may be estimated with the assumption that 1 mg is equivalent to 1 mm3 of tumor volume.

[2464] Results

[2465] Surrogate-ADCx25 had strong and dose-dependent anti-tumor activity per se in the MC38 syngeneic model. The isotype control ADC had significant lower activity than surrogate-ADCx25 at 1 mg/kg. (FIG. 2). A strong synergy was observed when combining a low single dose of surrogate-ADCx25 with anti-PD1 antibody (FIG. 3). High efficacy of higher doses of surrogate-ADCx25 in the present model prevented assessment of synergy at higher doses.

[2466] In vivo, a single dose of sur-ADCx25 at 0.5 or 1 mg/kg induced strong and durable anti-tumor activity against established CD25-negative solid tumors with infiltrating Treg cells (MC38 syngeneic model).

| Response summary | PR | CR | TFS |
|---|---|---|---|
| Vehicle | 0 | 0 | 0 |
| Sur ADCX25, 0.1 mg/kg | 0 | 1 | 1 |
| Sur ADCX25, 0.5 mg/kg | 2 | 8 | 8 |
| Sur ADCX25, 1 mg/kg | 2 | 8 | 8 |
| Anti-PD1, 5 mg/kg | 0 | 3 | 3 |
| B12-SG3249, 1 mg/kg | 2 | 2 | 2 |
| Sur ADCX25, 0.1 mg/kg + | 1 | 6 | 6 |
| anti-PD1 | | | |
| Sur ADCX25, 0.5 mg/kg + | 1 | 9 | 9 |
| anti-PD1 | | | |
| Sur ADCX25, 1 mg/kg + anti-PD1 | 0 | 10 | 10 |
| B12-SG3249, 1 mg/kg + anti-PD1 | 2 | 5 | 5 |

Coefficient of Drug Interaction (CDI)

Sur ADCX25, 0.1 mg/kg;
anti-PD1, 5 mg/kg;
Sur ADCX25, 0.1 mg/kg + anti-PD1
Day 21 0.268 (Synergism)

[2467] Response Table Criteria (Also Applicable to Example 4 and Example 6):

[2468] Treatment may cause partial regression (PR) or complete regression (CR) of the tumor in an animal.

[2469] In a PR response, the tumor volume is 50% or less of its Day 1 volume for three consecutive measurements during the course of the study, and equal to or greater than 13.5 mm³ for one or more of these three measurements.

[2470] In a CR response, the tumor volume is less than 13.5 mm³ for three consecutive measurements during the study.

[2471] Any animal with a CR response at the end of the study was additionally classified as a tumor-free survivor (TFS).

[2472] Animals were scored only once during the study for a PR or CR event and only as CR if both PR and CR criteria were satisfied.

[2473] CDI Methodology Also Applicable to Example 4 and Example 6):

[2474] The Coefficient of Drug Interaction (CDI) (11) in were assessed for subadditive, additive, or supra-additive (synergism) properties on Day 21, the last day all evaluable animals remained on study.

[2475] The CDI was determined according to the equation below:

CDI=AB/AxB

[2476] Where,
[2477] x=mean tumor volume
[2478] AB=xAB/xC
[2479] A=xA/xC
[2480] B=xB/xC

[2481] CDI<1 is supra-additive (i.e. synergism); CDI=1 is additive; CDI>1 is sub-additive

### Example 2: Synopsis of Fractionated Dosage Protocol

[2482] Indication

[2483] Patients with relapsed or refractory cluster of differentiation 25 (CD25)-positive acute myeloid leukemia (AML) or CD25-positive acute lymphoblastic leukemia (ALL) who have failed, or are intolerant to, any established therapy known to provide clinical benefit at current state of disease. Patients with myelodysplastic syndrome who have received treatment with hypomethylating agents and subsequently present with CD25+ AML and who failed, or are ineligible for standard induction therapy, are eligible for treatment with ADCx25.

[2484] Objectives

[2485] Primary Objectives:

[2486] The primary objectives for Part 1 (dose-escalation) and Part 2 (expansion) of the study are:
[2487] Evaluate the safety and tolerability and determine the maximum tolerated dose (MTD) of ADCX25 in patients with CD25-positive relapsed or refractory AML and CD25-positive ALL (Part 1).
[2488] Determine the recommended dose of ADCX25 for Part 2.
[2489] Evaluate the safety and tolerability of ADCX25 in Part 2 at the dose level recommended in Part 1.

[2490] Secondary Objectives:

[2491] The secondary objectives for Part 1 and Part 2 of the study are:
[2492] Evaluate the clinical activity of ADCX25, based on the patient's response to treatment (complete response [CR], CR with incomplete blood count recover [CRi], partial response [PR], progressive disease [PD], no response [NR]) and determination of the overall duration of response (DOR), overall response rate (ORR), overall survival (OS), and progression-free survival (PFS).
[2493] Characterize the pharmacokinetic (PK) profile of ADCX25 (total antibody, drug-to-antibody ratio [DAR] 0), PBD-conjugated antibody (DAR 1), and free warhead SG3199.
[2494] Evaluate anti-drug antibodies (ADAs) to ADCX25 in blood before, during, and after treatment with ADCX25.

[2495] Efficacy Assessment

[2496] Assessment of response to treatment with ADCX25 will be based on bone marrow samples (aspirate or biopsy, if aspirate unattainable). The activity of ADCX25 will be evaluated based on the Investigator's evaluation of the patient's response to ADCX25 as CR, CRi, PR, PD, or NR as defined herein.

[2497] PK Assessment

[2498] The PK profile of ADCX25 (total antibody; drug-to-antibody ratio [DAR]≥0), PBD-conjugated antibody (DAR≥1), and free warhead will be assessed. Additional PK, ADA, cytokines, and serum CD25 (sCD25); blood samples will be collected at the discretion of the Investigator during any visit where toxicity is observed. A PK, ADA, cytokines, and sCD25 sample will also be collected concurrently with any other blood draw to assess safety (e.g., Unscheduled Visit), if possible. The PK profile will include determination of standard PK parameters (e.g., maximum concentration [Cmax], time to Cmax [Tmax], AUC0-last, AUC0-τ, AUC0-∞, AI, Vss, MRT, λz, t1/2, CL, and Vz.).

[2499] Safety Assessment

[2500] Safety will be assessed based on AEs, serious AEs (SAEs), treatment discontinuations due to AEs, DLTs (as defined herein) measurements of cytokines in serum, periodic 12-lead electrocardiogram (ECG) recordings, physical examinations, vital signs measurements, ECOG performance status, and hematology, biochemistry, coagulation panel, pregnancy testing (for women of child-bearing potential) and urinalysis test results. Adverse events will be graded according to CTCAE Version 4.0 (v4.03, published Jun. 14, 2010; NIH Publication No. 09-5410).

[2501] Product Dosage and Mode of Administration

[2502] ADCX25 is a sterile formulation containing PBD-conjugated HuMax®-TAC (DAR≥1), HuMax®-TAC (DAR=0), and SG3249. It is provided pre-formulated in 10-mL glass vials containing approximately 30 mg of ADCX25 per vial (deliverable volume 5.4 mL at 6 mg/mL). The appropriate quantity of ADCX25 will be diluted in 50 mL of 5% dextrose in water (D5W).

[2503] Patients will receive a 1-hour intravenous (IV) infusion of ADCX25 on Day 1 of Cycle 1. If ADCX25 is well tolerated after the first infusion, the infusion duration may be shortened to 30 minutes for subsequent cycles for that patient, at the Investigator's discretion.

[2504] The investigational product administration schedule is as follows:

[2505] Patients will be given ADCX25 (weekly [QW]) on Days 1, 8, and 15 of each 3-week (21-day) treatment cycle.

[2506] A patient will maintain the same treatment schedule throughout the duration of the trial.

[2507] Once a patient achieves CR/CRi, frequency or dose may be adjusted by the DESC based on emerging safety, efficacy, and PK profile.

[2508] The trial will be continuously monitored for emerging safety, efficacy and/or PK profile, and the DESC will determine if it is appropriate to maintain a QW schedule, revert to an every 3-week (Q3W) schedule, or test other dosing regimens.

[2509] Dose Escalation Design

[2510] Dose-escalation (Part 1) will be conducted according to a 3+3 design. The initial dose of ADCX25 will be 3 μg/kg (Dose Level 1), and the highest allowed dose will be 300 μg/kg.

[2511] The DLT observation period for dose-escalation will be 1 cycle. The first patient at each new dose level must be observed for 7 days for occurrence of AEs prior to treating the second patient at that dose level. Patients will be entered sequentially to each dose level.

[2512] For each dose level, if none of the first 3 patients at that level experiences a DLT, new patients may be entered at the next higher dose level. If 1 of 3 patients experiences a DLT, up to 3 more patients are to be treated at that same dose level. If none of the additional 3 patients at that dose level experiences a DLT, new patients may then be entered at the next higher dose level. However, if 1 or more of the additional 3 patients experience a DLT, then no further patients are to be started at that dose level and the preceding dose is identified as the MTD. The MTD; therefore, is defined as the highest dose level at which none of the first 3 treated patients, or no more than 1 of the first 6 treated patients, experiences a DLT.

[2513] No intra-patient dose-escalation is allowed.

[2514] The number of dose levels will depend on the emergent toxicity profile of ADCX25 and will be decided by the DESC; PK and PD evaluations may also inform decision making. During Part 1 (dose-escalation), the DESC may expand enrolment at doses below the current dose level as part of the dose-escalation process.

[2515] Additional patients may only be added at a lower dose level provided there is at least 1 patient who has achieved a PR or better (Section 7.1). No more than 10 patients in total can be treated at any dose level unless ≥3 of the 10 patients have achieved a PR or better.

[2516] Patients will be given ADCX25 (QW) on Days 1, 8 and 15 of each 3-week treatment cycle.

[2517] The first dose level for the weekly fractionated dosage regime/3 week treatment cycle (QW) dosing will be based on the safety and tolerability of patients who have been treated on the single dose/3-week treatment cycle schedule(Q3W). The first 3 patients will be given a cumulative dose each cycle that is comparable to (but not higher than) the highest dose tested at the Q3W dose schedule at which 3 patients completed the DLT observation period without a DLT. For example, if the highest Q3W dose tested at which 3 patients did not experience a DLT was cohort 92 μg/kg, the first cohort to receive QW dosing will receive 30 μg/kg each week for 3 weeks.

[2518] When the dose is escalated, the dose may increase by 50% if no DLTs are observed at the current level. Once a DLT is observed at a given dose level, the next dose may only increase by 25%. The dose may never increase by more than 50%, or more than an absolute value of 20 μg/kg/week, whichever is less. During Part 1, the DESC may expand enrolment at doses below the current dose level as part of the dose-escalation process. Additional patients may only be added at a lower dose level provided there is at least 1 patient who has achieved a partial response (PR or better). No more than 10 patients in total can be treated at any dose level unless ≥3 of the 10 patients have achieved a PR or better.

[2519] During Part 2 (dose expansion), patients will be monitored for safety using the same DLT criteria employed during dose-escalation. If during the treatment period, >30% of patients experience safety events that would meet the criteria that define a DLT in the dose-escalation phase of the study, enrolment in the expansion cohort(s) may be paused and the study data reviewed to determine whether additional monitoring or other action (such as alternate dose levels) should be evaluated prior to further enrolment.

[2520] A maximum of 80 patients (up to 50 patients in Part 1 and up to 30 patients in Part 2) may be enrolled at approximately 10 study sites in Part 1 and 10 study sites in Part 2.

[2521] Selected Results

[2522] It was observed that in 2 subjects with AML who had previously received bone marrow stem cell transfers, administration of ADCx25 led to complete remission of the AML.

[2523] Patient 1: (50 y/o M Relapsd AML, FAB M0, 30 Uq/Kq QW Cohort)
[2524] Date of AML diagnosis: 12 Jun. 2017
[2525] No FLT3-ITD Mutation
[2526] No Multilineage Dysplasia Syndrome
[2527] No Cytogenetic translocations
[2528] Immunophenotypic Analysis not available
[2529] 10 Dec. 2013 Allogenic Transplant (matched sibling Stem Cell Transplant)
[2530] Patient achieved CRi after 5 cycles of ADCx25(˜September 2017)
[2531] Patient came off study November 2017

[2532] Patient 2: (73 y/o M; Relapsed AML FAB M4, 37.5 ug/Kq QW Cohort)
[2533] Date of AML diagnosis: September-2013
[2534] No FLT3-ITD Mutation
[2535] No Multilineage Dysplasia Syndrome
[2536] Immunophenotypic Analysis Available
[2537] CD2 (−), CD3 (−), CD4 (+), CD5 (−), CD7 (−), CD8 (−), CD9 (Not Done), CD10 (−), CD11b (−), CD11c (−), CD13 (+) and CD14 (−)
[2538] 30 Jul. 2015 Allogenic Transplant

### Example 3

[2539] Re-Challenge of Tumor-Free Survivors from Example 1 MC38 Efficacy Study

[2540] The complete responders from Example 1 and 10 naïve control female C57BL/6 mice were or 17-18 weeks old on Day 1 of this study and had a BW range of 20.9 to 39.0 g.

[2541] On Day 1 of the re-challenge study, 5×105 MC38 cells (0.1 mL suspension) were subcutaneously implanted into the left flank (contralateral to the original cell implant) and tumor growth was monitored. No ADC or anti-PD-1 treatment was administered in the rechallenge study.

[2542] Animal handling and tumour measurement was as in Example 1 unless otherwise stated.

[2543] Results: Re-challenged animals did not develop new tumors indicating ADCx25 was able to induce tumor-specific protective immunity (see FIG. 4).

### Example 4

[2544] In Vivo Efficacy Study of Surrogate-ADCx25 in an Immuno-Competent Syngeneic Mouse Model Using Mouse Colon Cancer CT26 Cells

[2545] Introduction

[2546] CT26 is a CD25-ve mouse colon cancer-derived model used pre-clinically in immunotherapy-type studies which is known to have infiltration of Treg and Teff cells.

[2547] Study Design

[2548] Female BALB/c mice (BALB/cNCrl, Charles River) were nine weeks old on Day 1 of the study and had a body weight (BW) range of 17.2 to 23.3 g. At the completion of the study,, tumor-free survivors were transferred to they re-challenge study described in Example 5.

[2549] On the day of implant 3×10⁵ CT26 cells (0.1 mL suspension) were subcutaneously implanted into the right flank of each test animal. Tumors were monitored as their volumes approached the target range of 80-120 mm³. Ten days after tumor cell implantation, on Day 1 of the study, animals were sorted into ten groups (n=10/group) with individual tumor volumes of 75 to 162 mm³, and group mean tumor volumes of 110-111 mm³. All doses were administered intraperitoneally (i.p.) on Day 1 except for anti-PD-1 which was administered once on Days 2, 5, 8. The dosing volume was 0.2 mL per 20 grams of body weight (10 mL/kg), and was scaled to the body weight of each individual animal. Tumors were measured twice per week until the study was ended on Day 48. Each animal was euthanized when its tumor attained the endpoint tumor volume of 2000 mm³ or on the final day, whichever came first.

[2550] Tumors were measured in two dimensions using calipers, and volume was calculated using the formula:

Tumor Volume (mm³)=w2×l/2, where w=width and l=length,in mm,of the tumor.

[2551] Tumor weight may be estimated with the assumption that 1 mg is equivalent to 1 mm³ of tumor volume.

[2552] Results: In vivo, a single dose of sur-ADCx25 at 0.5 or 1 mg/kg induced strong and durable anti-tumor activity against established CD25-negative solid tumors with infiltrating Treg cells (CT26 syngeneic model); see FIG. 5 FIG. 6.

| Response summary | PR | CR | TFS |
|---|---|---|---|
| Vehicle | 0 | 0 | 0 |
| Sur ADCX25, 0.1 mg/kg | 0 | 0 | 0 |
| Sur ADCX25, 0.5 mg/kg | 1 | 2 | 2 |
| Sur ADCX25, 1 mg/kg | 1 | 3 | 3 |
| Anti-PD1, 5 mg/kg | 0 | 0 | 0 |
| Isotype-ADC, 1 mg/kg | 0 | 0 | 0 |
| Sur ADCX25, 0.1 mg/kg + | 1 | 1 | 1 |
| anti-PD1 | | | |
| Sur ADCx25, 0.5 mg/kg + anti-PD1 | 0 | 7 | 7 |
| Sur ADCX25, 1 mg/kg + anti-PD1 | 0 | 8 | 8 |
| Isotype-ADC, 1 mg/kg + anti-PD1 | 0 | 1 | 1 |

Coefficient of Drug Interaction (CDI)

Sur ADCX25, 0.1 mg/kg;
anti-PD1, 5 mg/kg;
Sur ADCX25, 0.1 mg/kg + anti-PD1
Day 20 0.285 (Synergism)

### Example 5

[2553] Re-Challenge of Tumor-Free Survivors from Example 4 CT26 Efficacy Study

[2554] The complete responders from Example 4 and 10 naïve control female BALB/c mice were or 16-17 weeks old on Day 1 of the study and had a BW range of 18.2 to 24.4 g.

[2555] On Day 1 of the re-challenge study 3×10¹ CT26 cells (0.1 mL suspension) were subcutaneously implanted into the left flank (contralateral to the cell implant of example 4) and tumor growth was monitored and measured as described in example 4.

[2556] No treatment was administered in the re-challenge study.

[2557] Results: Re-challenged animals did not develop new tumors indicating ADCx25 was able to induce tumor-specific protective immunity (see FIG. 7).

### Example 6

[2558] surADCx25 Anti-Tumour Activity Against CD25-Ve Tumours is Dependent on C8+ T-Cells

[2559] Study Design

[2560] Female C57BL/6 mice (C57BL/6NCrl, Charles River) were eleven weeks old on Day 1 of the study and had a body weight (BW) range of 18.6 to 28.2 g.

[2561] On the day of implant 5×10⁵ MC38 cells (0.1 mL suspension) were subcutaneously implanted into the right flank of each test animal. Tumors were monitored as their volumes approached the target range of 80-120 mm³.

[2562] Fifteen days after tumor cell implantation, on Day 0 of the study, animals were sorted into groups (n=10/group) with individual tumor volumes of 75 to 126 mm3, and with group mean tumor volumes of 86-89 mm³. All doses were administered intraperitoneally (i.p.).

[2563] Anti-CD8-2.43 murine monoclonal antibody was administered once daily on Days 0, 5, 8 and 13 in order to deplete and suppress levels of CD8+ T-cells.

[2564] SurADCx25 dose was administered on Day 1.

[2565] Anti-PD-1 was administered once daily on Days 2, 5, 8.

[2566] The dosing volume was 0.2 mL per 20 grams of body weight (10 mL/kg), and was scaled to the body weight of each individual animal.

[2567] Tumors were measured twice per week until the study was ended (day29 for anti-CD8+surADCx25 and anti-CD8+anti-PD1+surADCx25 groups; day 44 for surADCx25 alone and surADCx25+anti-CD8).

[2568] Each animal was euthanized when its tumor attained the endpoint tumor volume of 1000 mm³ or on the final day, whichever came first.

[2569] Results

[2570] Sur-ADCx25 anti-tumor activity, either alone (FIG. 8) or combined with an anti-PD1 antibody (FIG. 9), was significantly reduced when CD8+ T-cells are depelted, indicating that surADCx25 activity is CD8+ T-cell-dependent and that overall effector T-cell responses were not negatively impacted by sur-ADCx25.

| Response summary | PR | CR | TFS |
|---|---|---|---|
| Vehicle | 0 | 0 | 0 |
| Anti-PD1 | 2 | 0 | 0 |
| Sur ADCX25 | 0 | 1 | 1 |
| Sur ADCX25 + anti-CD8 | 0 | 0 | 0 |
| Sur ADCX25 + anti-PD1 | 2 | 5 | 5 |
| Sur ADCX25 + anti-PD1 + anti-CD8 | 0 | 0 | 0 |

Coefficient of Drug Interaction (CDI)

Sur ADCX25, 0.5 mg/kg;
anti-PD1, 5 mg/kg;
Sur ADCX25, 0.5 mg/kg + anti-PD1
Day 22 0.471 (Synergism)

### Example 7

[2571] T-Cell Immuno-Profiling after SurADCx25 Dosing in Healthy Immuno-Competent Mice

[2572] Study Design

[2573] Eight to twelve week old, female C57BL/6 mice were dosed intravenously on day 1 with either surADCx25 (0.5 mg/kg) or an isotype control ADC (0.5 mg/kg). A non-dosed group acted as control (each group contained 24 mice).

[2574] Terminal samples (blood, spleen, lymph node and thymus) were obtained on days 1 (4 hrs post-dose), 7, 14 and 21 from 6 animals per group at each time-point. Additional non-terminal blood samples (mandibular bleeds) were obtained on days 4, 11 and 18 from 6 animals per group at each time-point.

[2575] Samples (tissue and blood) were processed for flow cytomtetry assessment and CD4⁺ T-cells (CD45⁺ CD3⁺ CD4⁺ CD8⁻), CD8⁺ T-cells (CD45⁺ CD3⁺ CD4⁻ CD8⁺) and T_{reg} cell (CD45⁺ CD3⁺ CD4⁺ CD25⁺ FoxP3⁺) content determined. Data represent the mean±SEM of T_{reg} cell population in the assayed tissue as a percentage of CD45⁺.

[2576] Results

[2577] Spleen:
[2578] a clear depletion of spleen Tregs was observed at 1 day & 7 days post surADCx25 administration, with Treg levels mostly recovering by day 14 (see FIG. 10A; % shown indicates the % reduction compared to vehicle)
[2579] there was no observed impact on the level of spleen CD8+ Teff cells (see FIG. 10B)

[2580] Lymph Nodes:
[2581] a clear depletion of lymph node Tregs was observed at 1 day & 7 days post surADCx25 administration, with Treg levels mostly recovering by day 14 (see FIG. 11A; % shown indicates the % reduction compared to vehicle)
[2582] there was no observed impact on the level of lymph node CD8+ Teff cells (see FIG. 11B)

[2583] Blood:
[2584] Increased variability in vehicle and isotype-control values due to low levels of events; measured with additional non-terminal blood samples (days 4, 11 and 18).
[2585] a clear depletion of blood Tregs was observed at 1 day, 7 days, and 11 days post surADCx25 administration, with Treg levels recovering by day 14 (see FIG. 12A; % shown indicates the % reduction compared to vehicle)
[2586] there was no observed mpact on the level of blood CD8+ Teff cells (see FIG. 12B)

[2587] Thymus:
[2588] a clear increase of thymus Tregs & CD8+ Teffs was observed at 7 days post surADCx25 administration, with Treg & CD8+ Teff levels mostly recovering by day 14 (see FIGS. 13A & B)

[2589] Summary

[2590] A single dose of SurADCx25 caused significant depletion of Tregs in spleen, lymph nodes and blood (>95%).

[2591] There was a clear increase in the thymus in the amount of Tregs at 7 days post-dose.

[2592] There was no depletion of Teff cells from spleen, lymph nodes and blood caused by SurADCx25, however, an increase in thymus Teff cells was also observed 7 days post dosing of SurADCx25.

[2593] Around Day 15, Tregs levels in blood, spleen, thymus and lymph nodes are restored to normal (vehicle control).

### Example 8

[2594] T-Cells Immuno-Profiling after surADCx25 Dosing in CT26 Tumor-Bearing Immune-Competent Mice

[2595] Study Design

[2596] Female BALB/c mice were ten weeks old on Day 1 of the study.

[2597] Cultured CT26 cells were harvested during log phase growth and resuspended in phosphate buffered saline (PBS) at a concentration of 3×10⁶ cells/mL. Tumors were initiated by subcutaneously implanting 3×10⁵ CT26 cells into the right flank of each test animal. Fourteen days after tumor cell implantation, on Day 1 of the studies, animals were sorted into groups (n=24 or 18) with mean tumor volumes of 115-116 mm³.

[2598] SurADCx25 was administered intraperitoneally (i.p.) on Day 1. Anti-PD-1 was administered i.p. once daily on Days 2, 5, 8. Group 1 received the PBS vehicle and served as the control. Group 2 received anti-PD-1 at 5 mg/kg. Groups 3 received surADCx25 at 1 mg/kg. Group 4 received surADCx25 at 1 mg/kg in combination with anti-PD-1 at 5 mg/kg.

[2599] Samples were collected for analysis by flow cytometry on Days 1 (pre-dose; Group 1 only, n=6), 3 (Groups 1-4, n=6) and 9 (Groups 1-4, n=6). Full blood volume was collected from each animal via terminal cardiac puncture and was processed for flow cytometry.

[2600] Immediately following blood collection, the tumor and the spleen were harvested from each animal and processed for flow cytometry and CD4+ T-cells (CD45+CD3+CD4+CD8-), CD8+ T-cells (CD45+CD3+CD4− CD8+) and Treg cell (CD45+CD3+CD4+CD25+ FoxP3+) content determined.

[2601] Results

[2602] Tumour:
[2603] a significant and sustained depletion of tumour Tregs was observed from 2 days through 11 days post surADCx25 administration (see FIG. 14A)
[2604] an increased tumour CD8+ Teff/Tregs ratio was observed from 2 days through 11 days post surADCx25 administration (see FIG. 14B).

[2605] Spleen:
[2606] a significant and sustained depletion of spleen Tregs was observed from 2 days through 11 days post surADCx25 administration (see FIG. 15A)
[2607] an increased spleen CD8+ Teff/Tregs ratio was observed from 2 days through 11 days post surADCx25 administration (see FIG. 15B).

[2608] Blood:
[2609] a significant and sustained depletion of blood Tregs was observed from 2 days through 11 days post surADCx25 administration (see FIG. 16A)
[2610] an increased blood CD8+ Teff/Tregs ratio was observed from 2 days through 11 days post surADCx25 administration (see FIG. 16B).

[2611] Summary and Conclusions

[2612] A single dose of surADCx25 to immuno-competent mice bearing established CT26 tumors caused significant and sustained depletion of Tregs in tumors, blood, and spleen.

[2613] The simultaneous increase observed in CD8+ Teff/Tregs ratio in tumors, blood, and spleen indicates that surADCx25 did not negatively impact the overall Teff cell response.

[2614] Together, the data set out in Examples 6 to 8 indicate that SurADCx25 depletion of Tregs together with activation of the CD8+ Teff response is an important mode of action in surADCx25's anti-tumour activity.

### Example 9

[2615] Preliminary Data from a Phase 1b Dose-Escalation Study of Camidanlumab Tesirine in Patients with Advanced Solid Tumors

[2616] Background

[2617] This is a report of preliminary data from a Phase 1b trial of Camidanlumab Tesirine (NCT03621982; ADC Therapeutics) in patients (pt) with selected advanced solid tumors 35 (AST) who have failed existing therapies.

[2618] Methods

[2619] This multicenter, open-label, dose-escalation (part 1), and dose-expansion (part 2) study is currently enrolling subjects (aged≥18 years) with selected AST. The primary objective is to evaluate the safety and tolerability and to identify the recommended dose. Secondary objectives are to assess preliminary antitumor activity, pharmacokinetics (PK), and immunogenicity.

[2620] Subjects receive 1-hour intravenous infusions of Camidanlumab Tesirine every 3 weeks (Q3W) from a starting dose cohort of 20 μg/kg. Subsequent cohorts are enrolled at escalating doses according to a 3+3 design.

[2621] Results

[2622] As of Apr. 16, 2019, 6 subjects have been treated at doses of 20-30 μg/kg. Pathological subtypes treated include pancreatic (n=3) and breast, renal, and lung (n=1 each) cancer. The 45 μg/kg dose level is now under examination.

[2623] No dose-limiting toxicities have been reported within the 21-day reporting period. The most common (≥3 pts) adverse events (AE) regardless of relationship to Camidanlumab Tesirine were fatigue and nausea. Most AEs were grade 52 and not related to Camidanlumab Tesirine. There were no reported grade ?3 AEs or serious AEs considered related to Camidanlumab Tesirine.

[2624] Stable disease has been the best response recorded so far as per the response evaluation criteria in solid tumors (n=2 at 20 μg/kg and, reported a few days after the cutoff date, n=2 at 30 μg/kg). Two subjects remain on treatment at 30 μg/kg.

[2625] Conclusions

[2626] This continuing study will further refine the recommended dose of Camidanlumab Tesirine in selected advanced solid tumors.

The application's sequence listing, which the Patent Office published only in electronic form, follows.

SEQUENCE LISTING (3165 sequences)

SEQ ID NO: 1 - protein, 127 aa, Artificial Sequence
  AB12 VH
QVQLVQSGAEVKKPGSSVKVSCKASGGTFSRYIINWVRQAPGQGLEWMGRIIPILGVENYAQKFQGRVTITADKSTSTAYMELSSLRSEDTAVYYCARKDWFDYWGQGTLVTVSSASTKGPSVFPLA

SEQ ID NO: 2 - protein, 119 aa, Artificial Sequence
  AB12 VL
EIVLTQSPGTLSLSPGERATLSCRASQSVSSYLAWYQQKPGQAPRLLIYGASSRATGIPDRFSGSGSGTDFTLTISRLEPEDFAVYYCQQYGSSPLTFGGGTKVEIKRTVAAPSVFIFP

SEQ ID NO: 3 - protein, 5 aa, Artificial Sequence
  VH CDR1
RYIIN

SEQ ID NO: 4 - protein, 17 aa, Artificial Sequence
  VH CDR2
RIIPILGVENYAQKFQG

SEQ ID NO: 5 - protein, 6 aa, Artificial Sequence
  VH CDR3
KDWFDY

SEQ ID NO: 6 - protein, 11 aa, Artificial Sequence
  VL CDR1
RASQSVSSYLA

SEQ ID NO: 7 - protein, 7 aa, Artificial Sequence
  VL CDR2
GASSRAT

SEQ ID NO: 8 - protein, 9 aa, Artificial Sequence
  VL CDR3
QQYGSSPLT

SEQ ID NO: 9 - protein, 7 aa, Artificial Sequence
  Camrelizumab
FSESTNS

SEQ ID NO: 10 - protein, 7 aa, Artificial Sequence
  Camrelizumab
SNTSESF

SEQ ID NO: 11 - protein, 14 aa, Artificial Sequence
  Camrelizumab
FRVTQLAPKAQIKQ

SEQ ID NO: 12 - protein, 7 aa, Artificial Sequence
  Camrelizumab
SNTSESF

SEQ ID NO: 13 - protein, 22 aa, Artificial Sequence
  Camrelizumab
SNTSESFKFRVTQLAPKAQIKE

SEQ ID NO: 14 - protein, 5 aa, Artificial Sequence
  BMS-936559/MDS-1105 (VH CDR1)
DYGFS

SEQ ID NO: 15 - protein, 17 aa, Artificial Sequence
  BMS-936559/MDS-1105 (VH CDR2)
WITAYNGNTNYAQKLQG

SEQ ID NO: 16 - protein, 8 aa, Artificial Sequence
  BMS-936559/MDS-1105 (VH CDR3)
DYFYGMDV

SEQ ID NO: 17 - protein, 11 aa, Artificial Sequence
  BMS-936559/MDS-1105 (VL CDR1)
RASQSVSSYLV

SEQ ID NO: 18 - protein, 7 aa, Artificial Sequence
  BMS-936559/MDS-1105 (VL CDR2)
DASNRAT

SEQ ID NO: 19 - protein, 9 aa, Artificial Sequence
  BMS-936559/MDS-1105 (VL CDR3)
QQRSNWPRT

SEQ ID NO: 20 - protein, 5 aa, Artificial Sequence
  BMS-936559 / MDX-1105 (VH CDR1)
TYAIS

SEQ ID NO: 21 - protein, 17 aa, Artificial Sequence
  BMS-936559 / MDX-1105 (VH CDR2)
GIIPIFGKAHYAQKFQG

SEQ ID NO: 22 - protein, 14 aa, Artificial Sequence
  BMS-936559 / MDX-1105 (VH CDR3)
KFHFVSGSPFGMDV

SEQ ID NO: 23 - protein, 11 aa, Artificial Sequence
  BMS-936559 / MDX-1105 (VL CDR1)
RASQSVSSYLA

SEQ ID NO: 24 - protein, 8 aa, Artificial Sequence
  BMS-936559 / MDX-1105 (VL CDR3)
QQRSNWPT

SEQ ID NO: 25 - protein, 5 aa, Artificial Sequence
  BMS-936559 / MDX-1105 (VH CDR1)
SYDVH

SEQ ID NO: 26 - protein, 17 aa, Artificial Sequence
  BMS-936559 / MDX-1105 (VH CDR2)
WLHADTGITKFSQKFQG

SEQ ID NO: 27 - protein, 9 aa, Artificial Sequence
  BMS-936559 / MDX-1105 (VH CDR3)
ERIQLWFDY

SEQ ID NO: 28 - protein, 11 aa, Artificial Sequence
  BMS-936559 / MDX-1105 (VL CDR1)
RASQGISSWLA

SEQ ID NO: 29 - protein, 7 aa, Artificial Sequence
  BMS-936559 / MDX-1105 (VL CDR2)
AASSLQS

SEQ ID NO: 30 - protein, 9 aa, Artificial Sequence
  BMS-936559 / MDX-1105 (VL CDR3)
QQYNSYPYT

SEQ ID NO: 31 - protein, 121 aa, Artificial Sequence
  durvalumab/MEDI4736 (VH)
EVQLVESGGGLVQPGGSLRLSCAASGFTFSRYWMSWVRQAPGKGLEWVANIKQDGSEKYYVDSVKGRFTISRDNAKNSLYLQMNSLRAEDTAVYYCAREGGWFGELAFDYWGQGTLVTVSS

SEQ ID NO: 32 - protein, 108 aa, Artificial Sequence
  durvalumab/MEDI4736 (VL)
EIVLTQSPGTLSLSPGERATLSCRASQRVSSSYLAWYQQKPGQAPRLLIYDASSRATGIPDRFSGSGSGTDFTLTISRLEPEDFAVYYCQQYGSLPWTFGQGTKVEIK

SEQ ID NO: 33 - protein, 107 aa, Artificial Sequence
  TRX518, a humanized agylcosylated (Fc disabled) IgG1 anti-GITR mAb (VL)
EIVMTQSPATLSVSPGERATLSCKASQNVGTNVAWYQQKPGQAPRLLIYSASYRYSGIPARFSGSGSGTEFTLTISSLQSEDFAVYYCQQYNTDPLTFGGGTKVEIK

SEQ ID NO: 34 - protein, 118 aa, Artificial Sequence
  TRX518, a humanized agylcosylated (Fc disabled) IgG1 anti-GITR mAb (VH)
QVTLRESGPALVKPTQTLTLTCTFSGFSLSTSGMGVGWIRQPPGKALEWLAHIWWDDDKYYNPSLKSRLTISKDTSKNQVVLTMTNMDPVDTATYYCARTRRYFPFAYWGQGTLVTVS

SEQ ID NO: 35 - protein, 118 aa, Artificial Sequence
  TRX518, a humanized agylcosylated (Fc disabled) IgG1 anti-GITR mAb (VH)
QVTLRESGPALVKPTQTLTLTCTFSGFSLSTSGMGVGWIRQPPGKALEWLAHIWWDDDKYYQPSLKSRLTISKDTSKNQVVLTMTNMDPVDTATYYCARTRRYFPFAYWGQGTLVTVS

SEQ ID NO: 36 - protein, 450 aa, Artificial Sequence
  MEDI0562 (aka Tavolixizumab, Tavolimab) (HC)
QVQLQESGPGLVKPSQTLSLTCAVYGGSFSSGYWNWIRKHPGKGLEYIGYISYNGITYHNPSLKSRITINRDTSKNQYSLQLNSVTPEDTAVYYCARYKYDYDGGHAMDYWGQGTLVTVSSASTKGPSVFPLAPSSKSTSGGTAALGCLVKDYFPEPVTVSWNSGALTSGVHTFPAVLQSSGLYSLSSVVTVPSSSLGTQTYICNVNHKPSNTKVDKRVEPKSCDKTHTCPPCPAPELLGGPSVFLFPPKPKDTLMISRTPEVTCVVVDVSHEDPEVKFNWYVDGVEVHNAKTKPREEQYNSTYRVVSVLTVLHQDWLNGKEYKCKVSNKALPAPIEKTISKAKGQPREPQVYTLPPSREEMTKNQVSLTCLVKGFYPSDIAVEWESNGQPENNYKTTPPVLDSDGSFFLYSKLTVDKSRWQQGNVFSCSVMHEALHNHYTQKSLSLSPG

SEQ ID NO: 37 - protein, 210 aa, Artificial Sequence
  MEDI0562 (aka Tavolixizumab, Tavolimab) (LC)
DIQMTQSPSSLSASVGDRVTITCRASQDISNYLNWYQQKPGKAPKLLIYYTSKLHSGVPSRFSGSGSGTDYTLTISSLQPEDFATYYCQQGSALPWTFGQGTKVEIKRTVAAPSVFIFPPSDEQLKSGTASVVCLLNNFYPREAKVQWKVDNALQSGNSQESVTEQDSKDSTYSLSSTLTLSKADYEKHKVYACEVTHQGLSSPVTKSFN

SEQ ID NO: 38 - protein, 402 aa, Artificial Sequence
  MEDI6383 (Efizonerimod alfa)
ESKYGPPCPPCPAPEFLGGPSVFLFPPKPKDTLMISRTPEVTCVVVDVSQEDPEVQFNWYVDGVEVHNAKTKPREEQFNSTYRVVSVLTVLHQDWLNGKEYKCKVSNKGLPSSIEKTISKAKGQPREPQVYTLPPSQEEMTKNQVSLTCLVKGFYPSDIAVEWESNGQPENNYKTTPPVLDSDGSFFLYSRLTVDKSRWQEGNVFSCSVMHEALHNHYTQKSLSLSLGKDQDKIEALSSKVQQLERSIGLKDLAMADLEQKVLEMEASTQVSHRYPRIQSIKVQFTEYKKEKGFILTSQKEDEIMKVQNNSVIINCDGFYLISLKGYFSQEVNISLHYQKDEEPLFQLKKVRSVNSLMVASLTYKDKVYLNVTTDNTSLDDFHVNGGELILIHQNPGEFCVL

SEQ ID NO: 39 - protein, 121 aa, Artificial Sequence
  OX40mAb24 (9B12) VH
QVQLQESGPGLVKPSQTLSLTCAVYGGSFSSGYWNWIRKHPGKGLEYIGYISYNGITYHNPSLKSRITINRDTSKNQYSLQLNSVTPEDTAVYYCARYKYDYDGGHAMDYWGQGTLVTVSS

SEQ ID NO: 40 - protein, 107 aa, Artificial Sequence
  OX40mAb24 (9B12) VL
DIQMTQSPSSLSASVGDRVTITCRASQDISNYLNWYQQKPGKAPKLLIYYTSKLHSGVPSRFSGSGSGTDYTLTISSLQPEDFATYYCQQGSALPWTFGQGTKVEIK

SEQ ID NO: 41 - protein, 5 aa, Artificial Sequence
  INCAGN1949 VH CDR1
GSAMH

SEQ ID NO: 42 - protein, 19 aa, Artificial Sequence
  INCAGN1949 VH CDR2
RIRSKANSYATAYAASVKG

SEQ ID NO: 43 - protein, 10 aa, Artificial Sequence
  INCAGN1949 VH CDR3
GIYDSSGYDY

SEQ ID NO: 44 - protein, 16 aa, Artificial Sequence
  INCAGN1949 VL CDR1
RSSQSLLHSNGYNYLD

SEQ ID NO: 45 - protein, 7 aa, Artificial Sequence
  INCAGN1949 VL CDR2
LGSNRAS

SEQ ID NO: 46 - protein, 9 aa, Artificial Sequence
  INCAGN1949 VL CDR3
MQALQTPLT

SEQ ID NO: 47 - protein, 121 aa, Artificial Sequence
  INCAGN1949 VH
EVQLVESGGGLVQPGGSLKLSCAASGFTFSGSAMHWVRQASGKGLEWVGRIRSKANSYATAYAASVKGRFTISRDDSKNTAYLQMNSLKTEDTAVYYCTSGIYDSSGYDYWGQGTLVTVSS

SEQ ID NO: 48 - protein, 112 aa, Artificial Sequence
  INCAGN1949 VL
DIVMTQSPLSLPVTPGEPASISCRSSQSLLHSNGYNYLDWYLQKPGQSPQLLIYLGSNRASGVPDRFSGSGSGTDFTLKISRVEAEDVGVYYCMQALQTPLTFGGGTKVEIK

SEQ ID NO: 49 - protein, 167 aa, Artificial Sequence
  Tremelimumab  VH
GVVQPGRSLRLSCAASGFTFSSYGMHWVRQAPGKGLEWVAVIWYDGSNKYYADSVKGRFTISRDNSKNTLYLQMNSLRAEDTAVYYCARDPRGATLYYYYYGMDVWGQGTTVTVSSASTKGPSVFPLAPCSRSTSESTAALGCLVKDYFPEPVTVSWNSGALTSGVH

SEQ ID NO: 50 - protein, 139 aa, Artificial Sequence
  Tremelimumab  VL
PSSLSASVGDRVTITCRASQSINSYLDWYQQKPGKAPKLLIYAASSLQSGVPSRFSGSGSGTDFTLTISSLQPEDFATYYCQQYYSTPFTFGPGTKVEIKRTVAAPSVFIFPPSDEQLKSGTASVVCLLNNFYPREAKV

SEQ ID NO: 51 - protein, 15 aa, Artificial Sequence
  Light chain CDR1
KASQSVDYDGDSYLN

SEQ ID NO: 52 - protein, 7 aa, Artificial Sequence
  Light Chain CDR2
DASNLVS

SEQ ID NO: 53 - protein, 9 aa, Artificial Sequence
  Light chain CDR3
QQSTEDPWT

SEQ ID NO: 54 - protein, 5 aa, Artificial Sequence
  heavy chain CDR1
SYWMN

SEQ ID NO: 55 - protein, 17 aa, Artificial Sequence
  heavy chain CDR2
QIWPGDGDTNYNGKFKG

SEQ ID NO: 56 - protein, 15 aa, Artificial Sequence
  heavy chain CDR3
RETTTVGRYYYAMDY

SEQ ID NO: 57 - protein, 447 aa, Artificial Sequence
  Vadastuximab talirine heavy chain
QVQLVQSGAEVKKPGASVKVSCKASGYTFTNYDINWVRQAPGQGLEWIGWIYPGDGSTKYNEKFKAKATLTADTSTSTAYMELRSLRSDDTAVYYCASGYEDAMDYWGQGTTVTVSSASTKGPSVFPLAPSSKSTSGGTAALGCLVKDYFPEPVTVSWNSGALTSGVHTFPAVLQSSGLYSLSSVVTVPSSSLGTQTYICNVNHKPSNTKVDKKVEPKSCDKTHTCPPCPAPELLGGPCVFLFPPKPKDTLMISRTPEVTCVVVDVSHEDPEVKFNWYVDGVEVHNAKTKPREEQYNSTYRVVSVLTVLHQDWLNGKEYKCKVSNKALPAPIEKTISKAKGQPREPQVYTLPPSRDELTKNQVSLTCLVKGFYPSDIAVEWESNGQPENNYKTTPPVLDSDGSFFLYSKLTVDKSRWQQGNVFSCSVMHEALHNHYTQKSLSLSPGK

SEQ ID NO: 58 - protein, 214 aa, Artificial Sequence
  Vadastuximab talirine light chain
DIQMTQSPSSLSASVGDRVTINCKASQDINSYLSWFQQKPGKAPKTLIYRANRLVDGVPSRFSGSGSGQDYTLTISSLQPEDFATYYCLQYDEFPLTFGGGTKVEIKRTVAAPSVFIFPPSDEQLKSGTASVVCLLNNFYPREAKVQWKVDNALQSGNSQESVTEQDSKDSTYSLSSTLTLSKADYEKHKVYACEVTHQGLSSPVTKSFNRGEC

SEQ ID NO: 59 - protein, 607 aa, Bos taurus bovine
MKWVTFISLLLLFSSAYSRGVFRRDTHKSEIAHRFKDLGEEHFKGLVLIAFSQYLQQCPFDEHVKLVNELTEFAKTCVADESHAGCEKSLHTLFGDELCKVASLRETYGDMADCCEKQEPERNECFLSHKDDSPDLPKLKPDPNTLCDEFKADEKKFWGKYLYEIARRHPYFYAPELLYYANKYNGVFQECCQAEDKGACLLPKIETMREKVLTSSARQRLRCASIQKFGERALKAWSVARLSQKFPKAEFVEVTKLVTDLTKVHKECCHGDLLECADDRADLAKYICDNQDTISSKLKECCDKPLLEKSHCIAEVEKDAIPENLPPLTADFAEDKDVCKNYQEAKDAFLGSFLYEYSRRHPEYAVSVLLRLAKEYEATLEECCAKDDPHACYSTVFDKLKHLVDEPQNLIKQNCDQFEKLGEYGFQNALIVRYTRKVPQVSTPTLVEVSRSLGKVGTRCCTKPESERMPCTEDYLSLILNRLCVLHEKTPVSEKVTKCCTESLVNRRPCFSALTPDETYVPKAFDEKLFTFHADICTLPDTEKQIKKQTALVELLKHKPKATEEQLKTVMENFVAFVDKCCAADDKEACFAVEGPKLVVSTQTALA

SEQ ID NO: 60 - protein, 272 aa, Homo sapiens
MDSYLLMWGLLTFIMVPGCQAELCDDDPPEIPHATFKAMAYKEGTMLNCECKRGFRRIKSGSLYMLCTGNSSHSSWDNQCQCTSSATRNTTKQVTPQPEEQKERKTTEMQSPMQPVDQASLPGHCREPPPWENEATERIYHFVVGQMVYYQCVQGYRALHRGPAESVCKMTHGKTRWTQPQLICTGEMETSQFPGEEKPQASPEGRPESETSCLVTTTDFQIQTEMAATMETSIFTTEYQVAVAGCVFLLISVLLLSGLTWQRRQRKSRRTI

SEQ ID NO: 61 - DNA, 3216 bp, Homo sapiens
ggcagtttcctggctgaacacgccagcccaatacttaaagagagcaactcctgactccgatagagactggatggacccacaagggtgacagcccaggcggaccgatcttcccatcccacatcctccggcgcgatgccaaaaagaggctgacggcaactgggccttctgcagagaaagacctccgcttcactgccccggctggtcccaagggtcaggaagatggattcatacctgctgatgtggggactgctcacgttcatcatggtgcctggctgccaggcagagctctgtgacgatgacccgccagagatcccacacgccacattcaaagccatggcctacaaggaaggaaccatgttgaactgtgaatgcaagagaggtttccgcagaataaaaagcgggtcactctatatgctctgtacaggaaactctagccactcgtcctgggacaaccaatgtcaatgcacaagctctgccactcggaacacaacgaaacaagtgacacctcaacctgaagaacagaaagaaaggaaaaccacagaaatgcaaagtccaatgcagccagtggaccaagcgagccttccaggtcactgcagggaacctccaccatgggaaaatgaagccacagagagaatttatcatttcgtggtggggcagatggtttattatcagtgcgtccagggatacagggctctacacagaggtcctgctgagagcgtctgcaaaatgacccacgggaagacaaggtggacccagccccagctcatatgcacaggtgaaatggagaccagtcagtttccaggtgaagagaagcctcaggcaagccccgaaggccgtcctgagagtgagacttcctgcctcgtcacaacaacagattttcaaatacagacagaaatggctgcaaccatggagacgtccatatttacaacagagtaccaggtagcagtggccggctgtgttttcctgctgatcagcgtcctcctcctgagtgggctcacctggcagcggagacagaggaagagtagaagaacaatctagaaaaccaaaagaacaagaatttcttggtaagaagccgggaacagacaacagaagtcatgaagcccaagtgaaatcaaaggtgctaaatggtcgcccaggagacatccgttgtgcttgcctgcgttttggaagctctgaagtcacatcacaggacacggggcagtggcaaccttgtctctatgccagctcagtcccatcagagagcgagcgctacccacttctaaatagcaatttcgccgttgaagaggaagggcaaaaccactagaactctccatcttattttcatgtatatgtgttcattaaagcatgaatggtatggaactctctccaccctatatgtagtataaagaaaagtaggtttacattcatctcattccaacttcccagttcaggagtcccaaggaaagccccagcactaacgtaaatacacaacacacacactctaccctatacaactggacattgtctgcgtggttcctttctcagccgcttctgactgctgattctcccgttcacgttgcctaataaacatccttcaagaactctgggctgctacccagaaatcattttacccttggctcaatcctctaagctaacccccttctactgagccttcagtcttgaatttctaaaaaacagaggccatggcagaataatctttgggtaacttcaaaacggggcagccaaacccatgaggcaatgtcaggaacagaaggatgaatgaggtcccaggcagagaatcatacttagcaaagttttacctgtgcgttactaattggcctctttaagagttagtttctttgggattgctatgaatgataccctgaatttggcctgcactaatttgatgtttacaggtggacacacaaggtgcaaatcaatgcgtacgtttcctgagaagtgtctaaaaacaccaaaaagggatccgtacattcaatgtttatgcaaggaaggaaagaaagaaggaagtgaagagggagaagggatggaggtcacactggtagaacgtaaccacggaaaagagcgcatcaggcctggcacggtggctcaggcctataaccccagctccctaggagaccaaggcgggagcatctcttgaggccaggagtttgagaccagcctgggcagcatagcaagacacatccctacaaaaaattagaaattggctggatgtggtggcatacgcctgtagtcctagccactcaggaggctgaggcaggaggattgcttgagcccaggagttcgaggctgcagtcagtcatgatggcaccactgcactccagcctgggcaacagagcaagatcctgtctttaaggaaaaaaagacaagatgagcataccagcagtccttgaacattatcaaaaagttcagcatattagaatcaccgggaggccttgttaaaagagttcgctgggcccatcttcagagtctctgagttgttggtctggaatagagccaaatgttttgtgtgtctaacaattcccaggtgctgttgctgctgctactattccaggaacacactttgagaaccattgtgttattgctctgcacgcccacccactctcaactcccacgaaaaaaatcaacttccagagctaagatttcggtggaagtcctggttccatatctggtgcaagatctcccctcacgaatcagttgagtcaacattctagctcaacaacatcacacgattaacattaacgaaaattattcatttgggaaactatcagccagttttcacttctgaaggggcaggagagtgttatgagaaatcacggcagttttcagcagggtccagattcagattaaataactattttctgtcatttctgtgaccaaccacatacaaacagactcatctgtgcactctccccctcccccttcaggtatatgttttctgagtaaagttgaaaagaatctcagaccagaaaatatagatatatatttaaatcttacttgagtagaactgattacgacttttgggtgttgaggggtctataagatcaaaacttttccatgataatactaagatgttatcgaccatttatctgtccttctctcaaaagtgtatggtggaattttccagaagctatgtgatacgtgatgatgtcatcactctgctgttaacatataataaatttattgctattgtttataaaagaataaatgatatttttt

SEQ ID NO: 62 - protein, 272 aa, Homo sapiens; identical to SEQ ID NO: 60

SEQ ID NO: 63 - protein, 288 aa, Homo sapiens
MQIPQAPWPVVWAVLQLGWRPGWFLDSPDRPWNPPTFFPALLVVTEGDNATFTCSFSNTSESFVLNWYRMSPSNQTDKLAAFPEDRSQPGQDCRFRVTQLPNGRDFHMSVVRARRNDSGTYLCGAISLAPKAQIKESLRAELRVTERRAEVPTAHPSPSPRPAGQFQTLVVGVVGGLLGSLVLLVWVLAVICSRAARGTIGARRTGQPLKEDPSAVPVFSVDYGELDFQWREKTPEPPVPCVPEQTEYATIVFPSGMGTSSPARRGSADGPRSAQPLRPEDGHCSWPL

SEQ ID NO: 64 - DNA, 2106 bp, Homo sapiens
agtttcccttccgctcacctccgcctgagcagtggagaaggcggcactctggtggggctgctccaggcatgcagatcccacaggcgccctggccagtcgtctgggcggtgctacaactgggctggcggccaggatggttcttagactccccagacaggccctggaacccccccaccttcttcccagccctgctcgtggtgaccgaaggggacaacgccaccttcacctgcagcttctccaacacatcggagagcttcgtgctaaactggtaccgcatgagccccagcaaccagacggacaagctggccgccttccccgaggaccgcagccagcccggccaggactgccgcttccgtgtcacacaactgcccaacgggcgtgacttccacatgagcgtggtcagggcccggcgcaatgacagcggcacctacctctgtggggccatctccctggcccccaaggcgcagatcaaagagagcctgcgggcagagctcagggtgacagagagaagggcagaagtgcccacagcccaccccagcccctcacccaggccagccggccagttccaaaccctggtggttggtgtcgtgggcggcctgctgggcagcctggtgctgctagtctgggtcctggccgtcatctgctcccgggccgcacgagggacaataggagccaggcgcaccggccagcccctgaaggaggacccctcagccgtgcctgtgttctctgtggactatggggagctggatttccagtggcgagagaagaccccggagccccccgtgccctgtgtccctgagcagacggagtatgccaccattgtctttcctagcggaatgggcacctcatcccccgcccgcaggggctcagccgacggccctcggagtgcccagccactgaggcctgaggatggacactgctcttggcccctctgaccggcttccttggccaccagtgttctgcagaccctccaccatgagcccgggtcagcgcatttcctcaggagaagcaggcagggtgcaggccattgcaggccgtccaggggctgagctgcctgggggcgaccggggctccagcctgcacctgcaccaggcacagccccaccacaggactcatgtctcaatgcccacagtgagcccaggcagcaggtgtcaccgtcccctacagggagggccagatgcagtcactgcttcaggtcctgccagcacagagctgcctgcgtccagctccctgaatctctgctgctgctgctgctgctgctgctgctgcctgcggcccggggctgaaggcgccgtggccctgcctgacgccccggagcctcctgcctgaacttgggggctggttggagatggccttggagcagccaaggtgcccctggcagtggcatcccgaaacgccctggacgcagggcccaagactgggcacaggagtgggaggtacatggggctggggactccccaggagttatctgctccctgcaggcctagagaagtttcagggaaggtcagaagagctcctggctgtggtgggcagggcaggaaacccctcccacctttacacatgcccaggcagcacctcaggccctttgtggggcagggaagctgaggcagtaagcgggcaggcagagctggaggcctttcaggccagccagcactctggcctcctgccgccgcattccaccccagcccctcacaccactcgggagagggacatcctacggtcccaaggtcaggagggcagggctggggttgactcaggcccctcccagctgtggccacctgggtgttgggagggcagaagtgcaggcacctagggccccccatgtgcccaccctgggagctctccttggaacccattcctgaaattatttaaaggggttggccgggctcccaccagggcctgggtgggaaggtacaggcgttcccccggggcctagtacccccgcgtggcctatccactcctcacatccacacactgcacccccactcctggggcagggccaccagcatccaggcggccagcaggcacctgagtggctgggacaagggatcccccttccctgtggttctattatattataattataattaaatatgagagcatgct

SEQ ID NO: 65 - protein, 288 aa, Homo sapiens
MQIPQAPWPVVWAVLQLGWRPGWFLDSPDRPWNPPTFSPALLVVTEGDNATFTCSFSNTSESFVLNWYRMSPSNQTDKLAAFPEDRSQPGQDCRFRVTQLPNGRDFHMSVVRARRNDSGTYLCGAISLAPKAQIKESLRAELRVTERRAEVPTAHPSPSPRPAGQFQTLVVGVVGGLLGSLVLLVWVLAVICSRAARGTIGARRTGQPLKEDPSAVPVFSVDYGELDFQWREKTPEPPVPCVPEQTEYATIVFPSGMGTSSPARRGSADGPRSAQPLRPEDGHCSWPL

SEQ ID NO: 66 - protein, 290 aa, Homo sapiens
MRIFAVFIFMTYWHLLNAFTVTVPKDLYVVEYGSNMTIECKFPVEKQLDLAALIVYWEMEDKNIIQFVHGEEDLKVQHSSYRQRARLLKDQLSLGNAALQITDVKLQDAGVYRCMISYGGADYKRITVKVNAPYNKINQRILVVDPVTSEHELTCQAEGYPKAEVIWTSSDHQVLSGKTTTTNSKREEKLFNVTSTLRINTTTNEIFYCTFRRLDPEENHTAELVIPELPLAHPPNERTHLVILGAILLCLGVALTFIFRLRKGRMMDVKKCGIQDTNSKKQSDTHLEET

SEQ ID NO: 67 - DNA, 873 bp, Homo sapiens
atgaggatatttgctgtctttatattcatgacctactggcatttgctgaacgcatttactgtcacggttcccaaggacctatatgtggtagagtatggtagcaatatgacaattgaatgcaaattcccagtagaaaaacaattagacctggctgcactaattgtctattgggaaatggaggataagaacattattcaatttgtgcatggagaggaagacctgaaggttcagcatagtagctacagacagagggcccggctgttgaaggaccagctctccctgggaaatgctgcacttcagatcacagatgtgaaattgcaggatgcaggggtgtaccgctgcatgatcagctatggtggtgccgactacaagcgaattactgtgaaagtcaatgccccatacaacaaaatcaaccaaagaattttggttgtggatccagtcacctctgaacatgaactgacatgtcaggctgagggctaccccaaggccgaagtcatctggacaagcagtgaccatcaagtcctgagtggtaagaccaccaccaccaattccaagagagaggagaagcttttcaatgtgaccagcacactgagaatcaacacaacaactaatgagattttctactgcacttttaggagattagatcctgaggaaaaccatacagctgaattggtcatcccagaactacctctggcacatcctccaaatgaaaggactcacttggtaattctgggagccatcttattatgccttggtgtagcactgacattcatcttccgtttaagaaaagggagaatgatggatgtgaaaaaatgtggcatccaagatacaaactcaaagaagcaaagtgatacacatttggaggagacgtaa

SEQ ID NO: 68 - protein, 290 aa, Homo sapiens; identical to SEQ ID NO: 66

SEQ ID NO: 69 - DNA, 748 bp, Homo sapiens
catgacattgcatccttcacccatcacttgtgaatttttgttttccacagctctcatttctccaaaaatgtgtttgagccacttggaaaatatgcctttaagccattcaagaactcaaggagctcagagatcatcctggaagctgtggctcttttgctcaatagttatgttgctatttctttgctccttcagttggctaatctttatttttctccaattagagactgctaaggagccctgtatggctaagtttggaccattaccctcaaaatggcaaatggcatcttctgaacctccttgcgtgaataaggtgtctgactggaagctggagatacttcagaatggcttatatttaatttatggccaagtggctcccaatgcaaactacaatgatgtagctccttttgaggtgcggctgtataaaaacaaagacatgatacaaactctaacaaacaaatctaaaatccaaaatgtaggagggacttatgaattgcatgttggggacaccatagacttgatattcaactctgagcatcaggttctaaaaaataatacatactggggtatcattttactagcaaatccccaattcatctcctagagacttgatttgatctcctcattcccttcagcacatgtagaggtgccagtgggtggattggagggagaagatattcaatttctagagtttgtctgtctacaaaaatcaacacaaacagaactcctctgcacgtgaattttcatctat

SEQ ID NO: 70 - DNA, 1083 bp, Homo sapiens
gtgggctcttgaaacccgagcatggcacagcacggggcgatgggcgcgtttcgggccctgtgcggcctggcgctgctgtgcgcgctcagcctgggtcagcgccccaccgggggtcccgggtgcggccctgggcgcctcctgcttgggacgggaacggacgcgcgctgctgccgggttcacacgacgcgctgctgccgcgattacccgggcgaggagtgctgttccgagtgggactgcatgtgtgtccagcctgaattccactgcggagacccttgctgcacgacctgccggcaccacccttgtcccccaggccagggggtacagtcccaggggaaattcagttttggcttccagtgtatcgactgtgcctcggggaccttctccgggggccacgaaggccactgcaaaccttggacagactgcacccagttcgggtttctcactgtgttccctgggaacaagacccacaacgctgtgtgcgtcccagggtccccgccggcagagccgcttgggtggctgaccgtcgtcctcctggccgtggccgcctgcgtcctcctcctgacctcggcccagcttggactgcacatctggcagctgaggagtcagtgcatgtggccccgagagacccagctgctgctggaggtgccgccgtcgaccgaagacgccagaagctgccagttccccgaggaagagcggggcgagcgatcggcagaggagaaggggcggctgggagacctgtgggtgtgagcctggccgtcctccggggccaccgaccgcagccagcccctccccaggagctccccaggccgcaggggctctgcgttctgctctgggccgggccctgctcccctggcagcagaagtgggtgcaggaaggtggcagtgaccagcgccctggaccatgcagttcggcggccgcggctgggccctgcaggagggagagagagacacagtcatggcccccttcctcccttgctggccctgatggggtggggtcttaggacgggaggctgtgtccgtgggtgtgcagtgcccagcacgggacccggctgcaggggaccttcaataaacacttgtccagtga

SEQ ID NO: 71 - DNA, 1003 bp, Homo sapiens
gtctacaccccctcctcacacgcacttcacctgggtcgggattctcaggtcatgaacggtcccagccacctccgggcagggcgggtgaggacggggacggggcgtgtccaactggctgtgggctcttgaaacccgagcatggcacagcacggggcgatgggcgcgtttcgggccctgtgcggcctggcgctgctgtgcgcgctcagcctgggtcagcgccccaccgggggtcccgggtgcggccctgggcgcctcctgcttgggacgggaacggacgcgcgctgctgccgggttcacacgacgcgctgctgccgcgattacccgggcgaggagtgctgttccgagtgggactgcatgtgtgtccagcctgaattccactgcggagacccttgctgcacgacctgccggcaccacccttgtcccccaggccagggggtacagtcccaggggaaattcagttttggcttccagtgtatcgactgtgcctcggggaccttctccgggggccacgaaggccactgcaaaccttggacagactgctgctggaggtgccgccgtcgaccgaagacgccagaagctgccagttccccgaggaagagcggggcgagcgatcggcagaggagaaggggcggctgggagacctgtgggtgtgagcctggccgtcctccggggccaccgaccgcagccagcccctccccaggagctccccaggccgcaggggctctgcgttctgctctgggccgggccctgctcccctggcagcagaagtgggtgcaggaaggtggcagtgaccagcgccctggaccatgcagttcggcggccgcggctgggccctgcaggagggagagagagacacagtcatggcccccttcctcccttgctggccctgatggggtggggtcttaggacgggaggctgtgtccgtgggtgtgcagtgcccagcacgggacccggctgcaggggaccttcaataaacacttgtccagtgaaaaaaaaaaaaaaa

SEQ ID NO: 72 - DNA, 1193 bp, Homo sapiens
gtctacaccccctcctcacacgcacttcacctgggtcgggattctcaggtcatgaacggtcccagccacctccgggcagggcgggtgaggacggggacggggcgtgtccaactggctgtgggctcttgaaacccgagcatggcacagcacggggcgatgggcgcgtttcgggccctgtgcggcctggcgctgctgtgcgcgctcagcctgggtcagcgccccaccgggggtcccgggtgcggccctgggcgcctcctgcttgggacgggaacggacgcgcgctgctgccgggttcacacgacgcgctgctgccgcgattacccgggcgaggagtgctgttccgagtgggactgcatgtgtgtccagcctgaattccactgcggagacccttgctgcacgacctgccggcaccacccttgtcccccaggccagggggtacagtcccaggggaaattcagttttggcttccagtgtatcgactgtgcctcggggaccttctccgggggccacgaaggccactgcaaaccttggacagactgcacccagttcgggtttctcactgtgttccctgggaacaagacccacaacgctgtgtgcgtcccagggtccccgccggcagagccgcttgggtggctgaccgtcgtcctcctggccgtggccgcctgcgtcctcctcctgacctcggcccagcttggactgcacatctggcagctgaggaagacccagctgctgctggaggtgccgccgtcgaccgaagacgccagaagctgccagttccccgaggaagagcggggcgagcgatcggcagaggagaaggggcggctgggagacctgtgggtgtgagcctggccgtcctccggggccaccgaccgcagccagcccctccccaggagctccccaggccgcaggggctctgcgttctgctctgggccgggccctgctcccctggcagcagaagtgggtgcaggaaggtggcagtgaccagcgccctggaccatgcagttcggcggccgcggctgggccctgcaggagggagagagagacacagtcatggcccccttcctcccttgctggccctgatggggtggggtcttaggacgggaggctgtgtccgtgggtgtgcagtgcccagcacgggacccggctgcaggggaccttcaataaacacttgtccagtgaaaaaaaaaaaaaaa

SEQ ID NO: 73 - protein, 241 aa, Homo sapiens
MAQHGAMGAFRALCGLALLCALSLGQRPTGGPGCGPGRLLLGTGTDARCCRVHTTRCCRDYPGEECCSEWDCMCVQPEFHCGDPCCTTCRHHPCPPGQGVQSQGKFSFGFQCIDCASGTFSGGHEGHCKPWTDCTQFGFLTVFPGNKTHNAVCVPGSPPAEPLGWLTVVLLAVAACVLLLTSAQLGLHIWQLRSQCMWPRETQLLLEVPPSTEDARSCQFPEEERGERSAEEKGRLGDLWV

SEQ ID NO: 74 - protein, 241 aa, Homo sapiens; identical to SEQ ID NO: 73

SEQ ID NO: 75 - protein, 277 aa, Homo sapiens
MCVGARRLGRGPCAALLLLGLGLSTVTGLHCVGDTYPSNDRCCHECRPGNGMVSRCSRSQNTVCRPCGPGFYNDVVSSKPCKPCTWCNLRSGSERKQLCTATQDTVCRCRAGTQPLDSYKPGVDCAPCPPGHFSPGDNQACKPWTNCTLAGKHTLQPASNSSDAICEDRDPPATQPQETQGPPARPITVQPTEAWPRTSQGPSTRPVEVPGGRAVAAILGLGLVLGLLGPLAILLALYLLRRDQRLPPDAHKPPGGGSFRTPIQEEQADAHSTLAKI

SEQ ID NO: 76 - protein, 277 aa, Homo sapiens; identical to SEQ ID NO: 75

SEQ ID NO: 77 - protein, 223 aa, Homo sapiens
MACLGFQRHKAQLNLATRTWPCTLLFFLLFIPVFCKAMHVAQPAVVLASSRGIASFVCEYASPGKATEVRVTVLRQADSQVTEVCAATYMMGNELTFLDDSICTGTSSGNQVNLTIQGLRAMDTGLYICKVELMYPPPYYLGIGNGTQIYVIDPEPCPDSDFLLWILAAVSSGLFFYSFLLTAVSLSKMLKKRSPLTTGVYVKMPPTEPECEKQFQPYFIPIN

SEQ ID NO: 78 - DNA, 2025 bp, Homo sapiens
cttctgtgtgtgcacatgtgtaatacatatctgggatcaaagctatctatataaagtccttgattctgtgtgggttcaaacacatttcaaagcttcaggatcctgaaaggttttgctctacttcctgaagacctgaacaccgctcccataaagccatggcttgccttggatttcagcggcacaaggctcagctgaacctggctaccaggacctggccctgcactctcctgttttttcttctcttcatccctgtcttctgcaaagcaatgcacgtggcccagcctgctgtggtactggccagcagccgaggcatcgccagctttgtgtgtgagtatgcatctccaggcaaagccactgaggtccgggtgacagtgcttcggcaggctgacagccaggtgactgaagtctgtgcggcaacctacatgatggggaatgagttgaccttcctagatgattccatctgcacgggcacctccagtggaaatcaagtgaacctcactatccaaggactgagggccatggacacgggactctacatctgcaaggtggagctcatgtacccaccgccatactacctgggcataggcaacggaacccagatttatgtaattgatccagaaccgtgcccagattctgacttcctcctctggatccttgcagcagttagttcggggttgtttttttatagctttctcctcacagctgtttctttgagcaaaatgctaaagaaaagaagccctcttacaacaggggtctatgtgaaaatgcccccaacagagccagaatgtgaaaagcaatttcagccttattttattcccatcaattgagaaaccattatgaagaagagagtccatatttcaatttccaagagctgaggcaattctaacttttttgctatccagctatttttatttgtttgtgcatttggggggaattcatctctctttaatataaagttggatgcggaacccaaattacgtgtactacaatttaaagcaaaggagtagaaagacagagctgggatgtttctgtcacatcagctccactttcagtgaaagcatcacttgggattaatatggggatgcagcattatgatgtgggtcaaggaattaagttagggaatggcacagcccaaagaaggaaaaggcagggagcgagggagaagactatattgtacacaccttatatttacgtatgagacgtttatagccgaaatgatcttttcaagttaaattttatgccttttatttcttaaacaaatgtatgattacatcaaggcttcaaaaatactcacatggctatgttttagccagtgatgctaaaggttgtattgcatatatacatatatatatatatatatatatatatatatatatatatatatatatattttaatttgatagtattgtgcatagagccacgtatgtttttgtgtatttgttaatggtttgaatataaacactatatggcagtgtctttccaccttgggtcccagggaagttttgtggaggagctcaggacactaatacaccaggtagaacacaaggtcatttgctaactagcttggaaactggatgaggtcatagcagtgcttgattgcgtggaattgtgctgagttggtgttgacatgtgctttggggcttttacaccagttcctttcaatggtttgcaaggaagccacagctggtggtatctgagttgacttgacagaacactgtcttgaagacaatggcttactccaggagacccacaggtatgaccttctaggaagctccagttcgatgggcccaattcttacaaacatgtggttaatgccatggacagaagaaggcagcaggtggcagaatggggtgcatgaaggtttctgaaaattaacactgcttgtgtttttaactcaatattttccatgaaaatgcaacaacatgtataatatttttaattaaataaaaatctgtggtggtcgttttaaaaaaaaaaaaaaaaaaaaaaaaaaaaaaaaaaaaaaaaaaaaaaaaaaaaaaaaaa

SEQ ID NO: 79 - protein, 223 aa, Homo sapiens; identical to SEQ ID NO: 77

SEQ ID NO: 80 - DNA, 5560 bp, Homo sapiens
cgcggggcgcggagtcggcggggcctcgcgggacgccgggcagtgcggagaccgcggcgctgaggacgcgggagccgggagcgcagccgcggggtggagttcagcctactctttcttagatgtgaaaggaaaggaagatcatttcatgccttgttgataaaggttcagacttctgctgattcataaccatttggctctgagctatgacaagagaggaaacaaaaagttaaacaagcaagcctgccataagtgagaagcaaacttccttgataacatgcttttgcgaagtgcaggaaaattaaatgtgggcaccaagaaagaggatggtgagagtacagcccccaccccccgtccaaaggtcttgcgttgtaaatgccaccaccattgtccagaagactcagtcaacaatatttgcagcacagacggatattgtttcacgatgatagaagaggatgactctgggttgcctgtggtcacttctggttgcctaggactagaaggctcagattttcagtgtcgggacactcccattcctcatcaaagaagatcaattgaatgctgcacagaaaggaacgaatgtaataaagacctacaccctacactgcctccattgaaaaacagagattttgttgatggacctatacaccacagggctttacttatatctgtgactgtctgtagtttgctcttggtccttatcatattattttgttacttccggtataaaagacaagaaaccagacctcgatacagcattgggttagaacaggatgaaacttacattcctcctggagaatccctgagagacttaattgagcagtctcagagctcaggaagtggatcaggcctccctctgctggtccaaaggactatagctaagcagattcagatggtgaaacagattggaaaaggtcgctatggggaagtttggatgggaaagtggcgtggcgaaaaggtagctgtgaaagtgttcttcaccacagaggaagccagctggttcagagagacagaaatatatcagacagtgttgatgaggcatgaaaacattttgggtttcattgctgcagatatcaaagggacagggtcctggacccagttgtacctaatcacagactatcatgaaaatggttccctttatgattatctgaagtccaccaccctagacgctaaatcaatgctgaagttagcctactcttctgtcagtggcttatgtcatttacacacagaaatctttagtactcaaggcaaaccagcaattgcccatcgagatctgaaaagtaaaaacattctggtgaagaaaaatggaacttgctgtattgctgacctgggcctggctgttaaatttattagtgatacaaatgaagttgacataccacctaacactcgagttggcaccaaacgctatatgcctccagaagtgttggacgagagcttgaacagaaatcacttccagtcttacatcatggctgacatgtatagttttggcctcatcctttgggaggttgctaggagatgtgtatcaggaggtatagtggaagaataccagcttccttatcatgacctagtgcccagtgacccctcttatgaggacatgagggagattgtgtgcatcaagaagttacgcccctcattcccaaaccggtggagcagtgatgagtgtctaaggcagatgggaaaactcatgacagaatgctgggctcacaatcctgcatcaaggctgacagccctgcgggttaagaaaacacttgccaaaatgtcagagtcccaggacattaaactctgataggagaggaaaagtaagcatctctgcagaaagccaacaggtactcttctgtttgtgggcagagcaaaagacatcaaataagcatccacagtacaagccttgaacatcgtcctgcttcccagtgggttcagacctcacctctcagggagcgacctgggcaaagacagagaagctcccagaaggagagattgatccatgtctgtttgtaggacggagaaaccgcttgggtaacttgttcaagatatgatgcatgttgctttctaagaaagccctgtattttgtgattgcctttttttttttttaagatgctttcattttgccaaaataaaacagataatgtggatggtttaagggttatagtattatagtttaaataataacaacaaaattcttcccaggaactctgctggaaggtaaattaaaatacttgtttttccattggtaaaatattgttgcactctgtgaaccaaaagacagtctaagttggaggacatagaacggaactcatcttaaacatactccccaccccgtcttggcctcctcagaccactttggccatccctgcatttggggccgctatggtaatgtgaatgcactgggtacaaacaccgcctgtctaggaccacatttggaattcctgcaggtggccttttgcagcttcaggcaatatggaacaaatgaaggtttatgtgactctaatagaagtaattgttgataggtgttcttcagatccacttctgtttctgattgagttaggcatctctttcatggtaaaacccttttcattaaacacaaagaaagcttttttttttttttttttttttttttttttttaatgtgcagaggattgacctgtgcatgcttttgatctctcattcaaaggatcaatattaaataaaattgtcatgagctgtgttgaagacagggtgctttcaaatagaggtaatttgctcttgtgttgtaagaggaacatgtcaacaaagataggaaatgagggtgatcgtgcagatggcttgtatcttatatatgcaaaggagccaatctcagaagcacaaagaaaaaagtgtgcataccttattttgtacagataaagatgatgtctttttgttattgtctgtctgttttgtatgtgtctgagataagggatagagaggaaacatccgtcaggctaatttaactacattttattttaaaaatagagaaacataacctctagatgggacagcagaggacagttagtagaggccacaaactgttatgggctgctgtgttttgttctaaaatcaatatggttggagcatgtatatcttaggtgatcatttcacatcttaggaatgcctactcattttattttattctagtgatgctcaattcactatttaatttattatattttctcttctgtggcacttatacaaaatatctcttcacctacttagttctacagggttttaactttggagcaacatgaataaaatcatcgagaaggccaatattgtttagcaacatgaatacaatacagtttaaagttgtacacatcctgctcaactttattcatatacatttcctttctgtggttttcttttgcttcttagaaattctgttagtggttagtaaagaatttgaaagtactttctccttgctgtttttttttttttttaagacattcctcccagaatactccagggggcagtgttttataacacattttccccactgggtgattgaaggatggaggatttttgaaaatttgacagctacatgaaacatgagaaaacattttcctcacttctgaagtcggtttgcagctggtaacttgttcatccagaaaacattctaaagcaatgagactttgtgagctgtgcttacagtttgggagaatcatgaagattctttctatattttgcatttacttcccagtgcttcatagctgcattttgtttgtaactaagacagaagaatttcgtaatccttgaaattgaaaaaaaaaaaattgtgtttttaaagagtgaaaacagttagaaaacaagtagaactgtaatcagaacgctgcttcaattgatattaaaaataacctcaataataatgtaaaggttcctttctcttgtgtcagttatattcttagggatagcctagaaggaatatatggttagaactaagtgtgactaatcatctgagccttgaagagaaacttcagtgcctctaaacagatcatctacaaaacaacaggtaaacatttatgccagttaagtgggtcatgtttttgtttcttgggtttttcctaaatttaagtgaggttgggcttaccttgtagataaaattatgttttctttttggtaaatacttgaacgtggataacgtcaaatcagaatattttgtgaggaggtgatgatttgaaattaagctagatttctagggaggtgttggttccaatgaaggatgggaagaaattaaaatagtcttcaaacttcttccttattatatttggttgctttggaaaagattggtcctatcctcaatctaatttattcactattaatattttaaaaacattcctgagatacttaaaaagacccacttagcgattatagttgctcaatgaaacaagaatttatttatgcatagatttttctctgtatcttaccaaaatccactttacttagataacactaaattgttcttaaagactactcatttcccaataatcctttatgatttcaaaatttctagtggctcagaagtgaattttattttatttgtctttcacttgaataaatgagaacccagaaattaataatgttgtttattgcttactgtcaggactatttcaaagactaagaagagtttcttctaacccctccctctcaaaggaatcctaaattattagttgttagataagttttgtatgctaagatattcaggtttatagtttatgtatgtgtgtatatatataaatatatatgtatatataaatattatgttcagtttggagtctggcacaactccattatgtggattagagagtaagatattatggatgataaagtactaaatgaaacataatatttatttataaaagtgtgtagattgttaaatcacaaaaagagtgctatgaccattatgtatgaggaaacaggcctttgacctcctggaaagcactgctcaaaagtcattagtgcccatttttgaattccccaaacagaaagcttcttagaaaacatgctgagattttatttacagggaattctttgacacatttcaattggtgtgtagtcaagtatagcaagtacttaataatgactgaatttcatgttcctacagtcatacatattcattagaagttttatgttgttggtctgatctgattcttctttgtttgtgggtggaacggcactgagagaagtatagttttttaaacttgaacatgttcagtagttacattgccttagaaaacccagacacatagcagtggaaatgaaagaaatggcatcagaagtgacttaatttagcaattgtgattcctcttgtaaaacaaaacaaaaaaacaatgccatattttttggagaaaagttggcaatataggggtttcgttgtctgtttcacaagaagactcatttgttcttttgggggaaccagtgccttacagattttgtatatactgtaattattcaggactagggaacaaacaattgtattgtatttgttacagattgtatatggctttgttttaacattcccctaaataaaatggcttcattctccccttggaaaaaaaca

SEQ ID NO: 81 - protein, 502 aa, Homo sapiens
MLLRSAGKLNVGTKKEDGESTAPTPRPKVLRCKCHHHCPEDSVNNICSTDGYCFTMIEEDDSGLPVVTSGCLGLEGSDFQCRDTPIPHQRRSIECCTERNECNKDLHPTLPPLKNRDFVDGPIHHRALLISVTVCSLLLVLIILFCYFRYKRQETRPRYSIGLEQDETYIPPGESLRDLIEQSQSSGSGSGLPLLVQRTIAKQIQMVKQIGKGRYGEVWMGKWRGEKVAVKVFFTTEEASWFRETEIYQTVLMRHENILGFIAADIKGTGSWTQLYLITDYHENGSLYDYLKSTTLDAKSMLKLAYSSVSGLCHLHTEIFSTQGKPAIAHRDLKSKNILVKKNGTCCIADLGLAVKFISDTNEVDIPPNTRVGTKRYMPPEVLDESLNRNHFQSYIMADMYSFGLILWEVARRCVSGGIVEEYQLPYHDLVPSDPSYEDMREIVCIKKLRPSFPNRWSSDECLRQMGKLMTECWAHNPASRLTALRVKKTLAKMSESQDIKL

SEQ ID NO: 82 - DNA, 4543 bp, Homo sapiens
cggcgggcggcgcgcacactgctcgctgggccgcggctcccgggtgtcccaggcccggccggtgcgcagagcatggcgggtgcgggcccgaagcggcgcgcgctagcggcgccggcggccgaggagaaggaagaggcgcgggagaagatgctggccgccaagagcgcggacggctcggcgccggcaggcgagggcgagggcgtgaccctgcagcggaacatcacgctgctcaacggcgtggccatcatcgtggggaccattatcggctcgggcatcttcgtgacgcccacgggcgtgctcaaggaggcaggctcgccggggctggcgctggtggtgtgggccgcgtgcggcgtcttctccatcgtgggcgcgctctgctacgcggagctcggcaccaccatctccaaatcgggcggcgactacgcctacatgctggaggtctacggctcgctgcccgccttcctcaagctctggatcgagctgctcatcatccggccttcatcgcagtacatcgtggccctggtcttcgccacctacctgctcaagccgctcttccccacctgcccggtgcccgaggaggcagccaagctcgtggcctgcctctgcgtgctgctgctcacggccgtgaactgctacagcgtgaaggccgccacccgggtccaggatgcctttgccgccgccaagctcctggccctggccctgatcatcctgctgggcttcgtccagatcgggaagggtgatgtgtccaatctagatcccaacttctcatttgaaggcaccaaactggatgtggggaacattgtgctggcattatacagcggcctctttgcctatggaggatggaattacttgaatttcgtcacagaggaaatgatcaacccctacagaaacctgcccctggccatcatcatctccctgcccatcgtgacgctggtgtacgtgctgaccaacctggcctacttcaccaccctgtccaccgagcagatgctgtcgtccgaggccgtggccgtggacttcgggaactatcacctgggcgtcatgtcctggatcatccccgtcttcgtgggcctgtcctgcttcggctccgtcaatgggtccctgttcacatcctccaggctcttcttcgtggggtcccgggaaggccacctgccctccatcctctccatgatccacccacagctcctcacccccgtgccgtccctcgtgttcacgtgtgtgatgacgctgctctacgccttctccaaggacatcttctccgtcatcaacttcttcagcttcttcaactggctctgcgtggccctggccatcatcggcatgatctggctgcgccacagaaagcctgagcttgagcggcccatcaaggtgaacctggccctgcctgtgttcttcatcctggcctgcctcttcctgatcgccgtctccttctggaagacacccgtggagtgtggcatcggcttcaccatcatcctcagcgggctgcccgtctacttcttcggggtctggtggaaaaacaagcccaagtggctcctccagggcatcttctccacgaccgtcctgtgtcagaagctcatgcaggtggtcccccaggagacatagccaggaggccgagtggctgccggaggagcatgcgcagaggccagttaaagtagatcacctcctcgaacccactccggttccccgcaacccacagctcagctgcccatcccagtccctcgccgtccctcccaggtcgggcagtggaggctgctgtgaaaactctggtacgaatctcatccctcaactgagggccagggacccaggtgtgcctgtgctcctgcccaggagcagcttttggtctccttgggccctttttcccttccctcctttgtttacttatatatatattttttttaaacttaaattttgggtcaacttgacaccactaagatgattttttaaggagctgggggaaggcaggagccttcctttctcctgccccaagggcccagaccctgggcaaacagagctactgagacttggaacctcattgctaccacagacttgcactgaagccggacagctgcccagacacatgggcttgtgacattcgtgaaaaccaaccctgtgggcttatgtctctgccttagggtttgcagagtggaaactcagccgtagggtggcactgggagggggtgggggatctgggcaaggtgggtgattcctcccaggaggtgcttgaggccccgatggactcctgaccataatcctagccccgagacaccatcctgagccagggaacagccccagggttggggggtgccggcatctcccctagctcaccaggcctggcctctgggcagtgtggcctcttggctatttctgtgtccagttttggaggctgagttctggttcatgcagacaaagccctgtccttcagtcttctagaaacagagacaagaaaggcagacacaccgcggccaggcacccatgtgggcgcccaccctgggctccacacagcagtgtcccctgccccagaggtcgcagctaccctcagcctccaatgcattggcctctgtaccgcccggcagccccttctggccggtgctgggttcccactcccggcctaggcacctccccgctctccctgtcacgctcatgtcctgtcctggtcctgatgcccgttgtctaggagacagagccaagcactgctcacgtctctgccgcctgcgtttggaggcccctgggctctcacccagtccccacccgcctgcagagagggaactagggcaccccttgtttctgttgttcccgtgaatttttttcgctatgggaggcagccgaggcctggccaatgcggcccactttcctgagctgtcgctgcctccatggcagcagccagggacccccagaacaagaagaccccgcaggatccctcctgagctcggggggctctgccttctcaggccccgggcttcccttctccccagccagaggtggagccaagtggtccagcgtcactccagtgctcagctgtggctggaggagctggcctgtggcacagccctgagtgtcccaagccgggagccaacgaagccggacacggcttcactgaccagcggctgctcaagccgcaagctctcagcaagtgcccagtggagcctgccgcccccgcctgggcaccgggaccccctcaccatccagtgggcccggagaaacctgatgaacagtttggggactcaggaccagatgtccgtctctcttgcttgaggaatgaagacctttattcacccctgccccgttgcttcccgctgcacatggacagacttcacagcgtctgctcataggacctgcatccttcctggggacgaattccactcgtccaagggacagcccacggtctggaggccgaggaccaccagcaggcaggtggactgactgtgttgggcaagacctcttccctctgggcctgttctcttggctgcaaataaggacagcagctggtgccccacctgcctggtgcattgctgtgtgaatccaggaggcagtggacatcgtaggcagccacggccccgggtccaggagaagtgctccctggaggcacgcaccactgcttcccactggggccggcggggcccacgcacgacgtcagcctcttaccttcccgcctcggctaggggtcctcgggatgccgttctgttccaacctcctgctctgggacgtggacatgcctcaaggatacagggagccggcggcctctcgacggcacgcacttgcctgttggctgctgcggctgtgggcgagcatgggggctgccagcgtctgttgtggaaagtagctgctagtgaaatggctggggccgctggggtccgtcttcacactgcgcaggtctcttctgggcgtctgagctggggtgggagctcctccgcagaaggttggtggggggtccagtctgtgatccttggtgctgtgtgccccactccagcctggggaccccacttcagaaggtaggggccgtgtcccgcggtgctgactgaggcctgcttccccctccccctcctgctgtgctggaattccacagggaccagggccaccgcaggggactgtctcagaagacttgatttttccgtccctttttctccacactccactgacaaacgtccccagcggtttccacttgtgggcttcaggtgttttcaagcacaacccaccacaacaagcaagtgcattttcagtcgttgtgcttttttgttttgtgctaacgtcttactaatttaaagatgctgtcggcaccatgtttatttatttccagtggtcatgctcagccttgctgctctgcgtggcgcaggtgccatgcctgctccctgtctgtgtcccagccacgcagggccatccactgtgacgtcggccgaccaggctggacaccctctgccgagtaatgacgtgtgtggctgggaccttctttattctgtgttaatggctaacctgttacactgggctgggttgggtagggtgttctggcttttttgtggggtttttatttttaaagaaacactcaatcatccta

SEQ ID NO: 83 - protein, 507 aa, Homo sapiens
MAGAGPKRRALAAPAAEEKEEAREKMLAAKSADGSAPAGEGEGVTLQRNITLLNGVAIIVGTIIGSGIFVTPTGVLKEAGSPGLALVVWAACGVFSIVGALCYAELGTTISKSGGDYAYMLEVYGSLPAFLKLWIELLIIRPSSQYIVALVFATYLLKPLFPTCPVPEEAAKLVACLCVLLLTAVNCYSVKAATRVQDAFAAAKLLALALIILLGFVQIGKGDVSNLDPNFSFEGTKLDVGNIVLALYSGLFAYGGWNYLNFVTEEMINPYRNLPLAIIISLPIVTLVYVLTNLAYFTTLSTEQMLSSEAVAVDFGNYHLGVMSWIIPVFVGLSCFGSVNGSLFTSSRLFFVGSREGHLPSILSMIHPQLLTPVPSLVFTCVMTLLYAFSKDIFSVINFFSFFNWLCVALAIIGMIWLRHRKPELERPIKVNLALPVFFILACLFLIAVSFWKTPVECGIGFTIILSGLPVYFFGVWWKNKPKWLLQGIFSTTVLCQKLMQVVPQET

SEQ ID NO: 84 - DNA, 1330 bp, Homo sapiens
gcggacgcggggcgccagcaggtggcgctggacgcgcaacggacaaggaggcggggcctgcagctggcttggaggctccgcgctctggaggctcaggcgccgcgtggggcccgcacctctgggcagcagcggcagccgagactcacggtcaagctaaggcgaagagtgggtggctgaagccatactattttatagaattaatggaaagcagaaaagacatcacaaaccaagaagaactttggaaaatgaagcctaggagaaatttagaagaagacgattatttgcataaggacacgggagagaccagcatgctaaaaagacctgtgcttttgcatttgcaccaaacagcccatgctgatgaatttgactgcccttcagaacttcagcacacacaggaactctttccacagtggcacttgccaattaaaatagctgctattatagcatctctgacttttctttacactcttctgagggaagtaattcaccctttagcaacttcccatcaacaatatttttataaaattccaatcctggtcatcaacaaagtcttgccaatggtttccatcactctcttggcattggtttacctgccaggtgtgatagcagcaattgtccaacttcataatggaaccaagtataagaagtttccacattggttggataagtggatgttaacaagaaagcagtttgggcttctcagtttcttttttgctgtactgcatgcaatttatagtctgtcttacccaatgaggcgatcctacagatacaagttgctaaactgggcatatcaacaggtccaacaaaataaagaagatgcctggattgagcatgatgtttggagaatggagatttatgtgtctctgggaattgtgggattggcaatactggctctgttggctgtgacatctattccatctgtgagtgactctttgacatggagagaatttcactatattcagagcaagctaggaattgtttcccttctactgggcacaatacacgcattgatttttgcctggaataagtggatagatataaaacaatttgtatggtatacacctccaacttttatgatagctgttttccttccaattgttgtcctgatatttaaaagcatactattcctgccatgcttgaggaagaagatactgaagattagacatggttgggaagacgtcaccaaaattaacaaaactgagatatgttcccagttgtagaattactgtttacacacatttttgttcaatattgatatattttatcaccaacatttcaagtttgtatttgttaataaaatgattattcaaggaaaaaaaaaaaaaaaaaa

SEQ ID NO: 85 - protein, 339 aa, Homo sapiens
MESRKDITNQEELWKMKPRRNLEEDDYLHKDTGETSMLKRPVLLHLHQTAHADEFDCPSELQHTQELFPQWHLPIKIAAIIASLTFLYTLLREVIHPLATSHQQYFYKIPILVINKVLPMVSITLLALVYLPGVIAAIVQLHNGTKYKKFPHWLDKWMLTRKQFGLLSFFFAVLHAIYSLSYPMRRSYRYKLLNWAYQQVQQNKEDAWIEHDVWRMEIYVSLGIVGLAILALLAVTSIPSVSDSLTWREFHYIQSKLGIVSLLLGTIHALIFAWNKWIDIKQFVWYTPPTFMIAVFLPIVVLIFKSILFLPCLRKKILKIRHGWEDVTKINKTEICSQL

SEQ ID NO: 86 - DNA, 21112 bp, Homo sapiens
cctgtgacttctcttctcacccctggcctggtgataaccacagacaggatgggcataagcagagaacctggaaccagttccacttcaaatttgagcagcacctcccatgagagactgaccactttggaagacactgtagatacagaagccatgcagccttccacacacacagcagtgaccaacgtgaggacctccatttctggacatgaatcacaatcttctgtcctatctgactcagagacacccaaagccacatctccaatgggtaccacctacaccatgggggaaacgagtgtttccatatccacttctgacttctttgagaccagcagaattcagatagaaccaacatcctccctgacttctggattgagggagaccagcagctctgagaggatcagctcagccacagagggaagcactgtcctttctgaagtgcccagtggtgctaccactgaggtctccaggacagaagtgatatcctctaggggaacatccatgtcagggcctgatcagttcaccatatcaccagacatctctactgaagcgatcaccaggctttctacttcccccattatgacagaatcagcagaaagtgccatcactattgagacaggttctcctggggctacatcagagggtaccctcaccttggacacctcaacaacaaccttttggtcagggacccactcaactgcatctccaggattttcacactcagagatgaccactcttatgagtagaactcctggagatgtgccatggccgagccttccctctgtggaagaagccagctctgtctcttcctcactgtcttcacctgccatgacctcaacttcttttttctccacattaccagagagcatctcctcctctcctcatcctgtgactgcacttctcacccttggcccagtgaagaccacagacatgttgcgcacaagctcagaacctgaaaccagttcacctccaaatttgagcagcacctcagctgaaatattagccacgtctgaagtcaccaaagatagagagaaaattcatccctcctcaaacacacctgtagtcaatgtagggactgtgatttataaacatctatccccttcctctgttttggctgacttagtgacaacaaaacccacatctccaatggctaccacctccactctggggaatacaagtgtttccacatcaactcctgccttcccagaaactatgatgacacagccaacttcctccctgacttctggattaagggagatcagtacctctcaagagaccagctcagcaacagagagaagtgcttctctttctggaatgcccactggtgctactactaaggtctccagaacagaagccctctccttaggcagaacatccaccccaggtcctgctcaatccacaatatcaccagaaatctccacggaaaccatcactagaatttctactcccctcaccacgacaggatcagcagaaatgaccatcacccccaaaacaggtcattctggggcatcctcacaaggtacctttaccttggacacatcaagcagagcctcctggccaggaactcactcagctgcaactcacagatctccacactcagggatgaccactcctatgagcagaggtcctgaggatgtgtcatggccaagccgcccatcagtggaaaaaactagccctccatcttccctggtgtctttatctgcagtaacctcaccttcgccactttattccacaccatctgagagtagccactcgtctcctctccgggtgacttctcttttcacccctgtcatgatgaagaccacagacatgttggacacaagcttggaacctgtgaccacttcacctcccagtatgaatatcacctcagatgagagtctggccacttctaaagccaccatggagacagaggcaattcagctttcagaaaacacagctgtgactcagatgggcaccatcagtgctagacaagaattctattcctcttatccaggcctcccagagccatccaaagtgacatctccagtggtcacctcttccaccataaaagacattgtttctacaaccatacctgcttcctctgagataacaagaattgagatggagtcaacatccaccctgacccccacaccaagggagaccagcacctcccaggagatccactcagccacaaagccaagcactgttccttacaaggcactcactagtgccacgattgaggactccatgacacaagtcatgtcctctagcagaggacctagccctgatcagtccacaatgtcacaagacatatccactgaagtgatcaccaggctctctacctcccccatcaagacagaatctacagaaatgaccattaccacccaaacaggttctcctggggctacatcaaggggtacccttaccttggacacttcaacaacttttatgtcagggacccattcaactgcatctcaaggattttcacactcacagatgaccgctcttatgagtagaactcctggagaggtgccatggctaagccatccctctgtggaagaagccagctctgcctctttctcactgtcttcacctgtcatgacctcatcttctcccgtttcttccacattaccagacagcatccactcttcttcgcttcctgtgacatcacttctcacctcagggctggtgaagaccacagagctgttgggcacaagctcagaacctgaaaccagttcacccccaaatttgagcagcacctcagctgaaatactggccaccactgaagtcactacagatacagagaaactggagatgaccaatgtggtaacctcaggttatacacatgaatctccttcctctgtcctagctgactcagtgacaacaaaggccacatcttcaatgggtatcacctaccccacaggagatacaaatgttctcacatcaacccctgccttctctgacaccagtaggattcaaacaaagtcaaagctctcactgactcctgggttgatggagaccagcatctctgaagagaccagctctgccacagaaaaaagcactgtcctttctagtgtgcccactggtgctactactgaggtctccaggacagaagccatctcttctagcagaacatccatcccaggccctgctcaatccacaatgtcatcagacacctccatggaaaccatcactagaatttctacccccctcacaaggaaagaatcaacagacatggccatcacccccaaaacaggtccttctggggctacctcgcagggtacctttaccttggactcatcaagcacagcctcctggccaggaactcactcagctacaactcagagatttccacggtcagtggtgacaactcctatgagcagaggtcctgaggatgtgtcatggccaagcccgctgtctgtggaaaaaaacagccctccatcttccctggtatcttcatcttcagtaacctcaccttcgccactttattccacaccatctgggagtagccactcctctcctgtccctgtcacttctcttttcacctctatcatgatgaaggccacagacatgttggatgcaagtttggaacctgagaccacttcagctcccaatatgaatatcacctcagatgagagtctggccgcttctaaagccaccacggagacagaggcaattcacgtttttgaaaatacagcagcgtcccatgtggaaaccaccagtgctacagaggaactctattcctcttccccaggcttctcagagccaacaaaagtgatatctccagtggtcacctcttcctctataagagacaacatggtttccacaacaatgcctggctcctctggcattacaaggattgagatagagtcaatgtcatctctgacccctggactgagggagaccagaacctcccaggacatcacctcatccacagagacaagcactgtcctttacaagatgccctctggtgccactcctgaggtctccaggacagaagttatgccctctagcagaacatccattcctggccctgctcagtccacaatgtcactagacatctccgatgaagttgtcaccaggctgtctacctctcccatcatgacagaatctgcagaaataaccatcaccacccaaacaggttattctctggctacatcccaggttacccttcccttgggcacctcaatgacctttttgtcagggacccactcaactatgtctcaaggactttcacactcagagatgaccaatcttatgagcaggggtcctgaaagtctgtcatggacgagccctcgctttgtggaaacaactagatcttcctcttctctgacatcattacctctcacgacctcactttctcctgtgtcctccacattactagacagtagcccctcctctcctcttcctgtgacttcacttatcctcccaggcctggtgaagactacagaagtgttggatacaagctcagagcctaaaaccagttcatctccaaatttgagcagcacctcagttgaaataccggccacctctgaaatcatgacagatacagagaaaattcatccttcctcaaacacagcggtggccaaagtgaggacctccagttctgttcatgaatctcattcctctgtcctagctgactcagaaacaaccataaccataccttcaatgggtatcacctccgctgtggaggataccactgttttcacatcaaatcctgccttctctgagactaggaggattccgacagagccaacattctcattgactcctggattcagggagactagcacctctgaagagaccacctcaatcacagaaacaagtgcagtcctttttggagtgcccactagtgctactactgaagtctccatgacagaaataatgtcctctaatagaacacacatccctgactctgatcagtccacgatgtctccagacatcatcactgaagtgatcaccaggctctcttcctcatccatgatgtcagaatcaacacaaatgaccatcaccacccaaaaaagttctcctggggctacagcacagagtactcttaccttggccacaacaacagcccccttggcaaggacccactcaactgttcctcctagatttttacactcagagatgacaactcttatgagtaggagtcctgaaaatccatcatggaagagctctccctttgtggaaaaaactagctcttcatcttctctgttgtccttacctgtcacgacctcaccttctgtttcttccacattaccgcagagtatcccttcctcctctttttctgtgacttcactcctcaccccaggcatggtgaagactacagacacaagcacagaacctggaaccagtttatctccaaatctgagtggcacctcagttgaaatactggctgcctctgaagtcaccacagatacagagaaaattcatccttcttcaagcatggcagtgaccaatgtgggaaccaccagttctggacatgaactatattcctctgtttcaatccactcggagccatccaaggctacatacccagtgggtactccctcttccatggctgaaacctctatttccacatcaatgcctgctaattttgagaccacaggatttgaggctgagccattttctcatttgacttctggacttaggaagaccaacatgtccctggacaccagctcagtcacaccaacaaatacaccttcttctcctgggtccactcaccttttacagagttccaagactgatttcacctcttctgcaaaaacatcatccccagactggcctccagcctcacagtatactgaaattccagtggacataatcaccccctttaatgcttctccatctattacggagtccactgggataacctccttcccagaatccaggtttactatgtctgtaacagaaagtactcatcatctgagtacagatttgctgccttcagctgagactatttccactggcacagtgatgccttctctatcagaggccatgacttcatttgccaccactggagttccacgagccatctcaggttcaggtagtccattctctaggacagagtcaggccctggggatgctactctgtccaccattgcagagagcctgccttcatccactcctgtgccattctcctcttcaaccttcactaccactgattcttcaaccatcccagccctccatgagataacttcctcttcagctaccccatatagagtggacaccagtcttgggacagagagcagcactactgaaggacgcttggttatggtcagtactttggacacttcaagccaaccaggcaggacatcttcatcacccattttggataccagaatgacagagagcgttgagctgggaacagtgacaagtgcttatcaagttccttcactctcaacacggttgacaagaactgatggcattatggaacacatcacaaaaatacccaatgaagcagcacacagaggtaccataagaccagtcaaaggccctcagacatccacttcgcctgccagtcctaaaggactacacacaggagggacaaaaagaatggagaccaccaccacagctctgaagaccaccaccacagctctgaagaccacttccagagccaccttgaccaccagtgtctatactcccactttgggaacactgactcccctcaatgcatcaatgcaaatggccagcacaatccccacagaaatgatgatcacaaccccatatgttttccctgatgttccagaaacgacatcctcattggctaccagcctgggagcagaaaccagcacagctcttcccaggacaaccccatctgttttcaatagagaatcagagaccacagcctcactggtctctcgttctggggcagagagaagtccggttattcaaactctagatgtttcttctagtgagccagatacaacagcttcatgggttatccatcctgcagagaccatcccaactgtttccaagacaacccccaattttttccacagtgaattagacactgtatcttccacagccaccagtcatggggcagacgtcagctcagccattccaacaaatatctcacctagtgaactagatgcactgaccccactggtcactatttcggggacagatactagtacaacattcccaacactgactaagtccccacatgaaacagagacaagaaccacatggctcactcatcctgcagagaccagctcaactattcccagaacaatccccaatttttctcatcatgaatcagatgccacaccttcaatagccaccagtcctggggcagaaaccagttcagctattccaattatgactgtctcacctggtgcagaagatctggtgacctcacaggtcactagttctggcacagacagaaatatgactattccaactttgactctttctcctggtgaaccaaagaccatagcctcattagtcacccatcctgaagcacagacaagttcggccattccaacttcaactatctcgcctgctgtatcacggttggtgacctcaatggtcaccagtttggcggcaaagacaagtacaactaatcgagctctgacaaactcccctggtgaaccagctacaacagtttcattggtcacgcattctgcacagaccagcccaacagttccctggacaacttccatttttttccatagtaaatcagacaccacaccttcaatgaccaccagtcatggggcagaatccagttcagctgttccaactccaactgtttcaactgaggtaccaggagtagtgacccctttggtcaccagttctagggcagtgatcagtacaactattccaattctgactctttctcctggtgaaccagagaccacaccttcaatggccaccagtcatggggaagaagccagttctgctattccaactccaactgtttcacctggggtaccaggagtggtgacctctctggtcactagttctagggcagtgactagtacaactattccaattctgactttttctcttggtgaaccagagaccacaccttcaatggccaccagtcatgggacagaagctggctcagctgttccaactgttttacctgaggtaccaggaatggtgacctctctggttgctagttctagggcagtaaccagtacaactcttccaactctgactctttctcctggtgaaccagagaccacaccttcaatggccaccagtcatggggcagaagccagctcaactgttccaactgtttcacctgaggtaccaggagtggtgacctctctggtcactagttctagtggagtaaacagtacaagtattccaactctgattctttctcctggtgaactagaaaccacaccttcaatggccaccagtcatggggcagaagccagctcagctgttccaactccaactgtttcacctggggtatcaggagtggtgacccctctggtcactagttccagggcagtgaccagtacaactattccaattctaactctttcttctagtgagccagagaccacaccttcaatggccaccagtcatggggtagaagccagctcagctgttctaactgtttcacctgaggtaccaggaatggtgacctttctggtcactagttctagagcagtaaccagtacaactattccaactctgactatttcttctgatgaaccagagaccacaacttcattggtcacccattctgaggcaaagatgatttcagccattccaactttaggtgtctcccctactgtacaagggctggtgacttcactggtcactagttctgggtcagagaccagtgcgttttcaaatctaactgttgcctcaagtcaaccagagaccatagactcatgggtcgctcatcctgggacagaagcaagttctgttgttccaactttgactgtctccactggtgagccgtttacaaatatctcattggtcacccatcctgcagagagtagctcaactcttcccaggacaacctcaaggttttcccacagtgaattagacactatgccttctacagtcaccagtcctgaggcagaatccagctcagccatttcaacaactatttcacctggtataccaggtgtgctgacatcactggtcactagctctgggagagacatcagtgcaacttttccaacagtgcctgagtccccacatgaatcagaggcaacagcctcatgggttactcatcctgcagtcaccagcacaacagttcccaggacaacccctaattattctcatagtgaaccagacaccacaccatcaatagccaccagtcctggggcagaagccacttcagattttccaacaataactgtctcacctgatgtaccagatatggtaacctcacaggtcactagttctgggacagacaccagtataactattccaactctgactctttcttctggtgagccagagaccacaacctcatttatcacctattctgagacacatacaagttcagccattccaactctccctgtctcccctgatgcatcaaagatgctgacctcactggtcatcagttctgggacagacagcactacaactttcccaacactgacggagaccccatatgaaccagagacaacagccatacagctcattcatcctgcagagaccaacacaatggttcccaggacaactcccaagttttcccatagtaagtcagacaccacactcccagtagccatcaccagtcctgggccagaagccagttcagctgtttcaacgacaactatctcacctgatatgtcagatctggtgacctcactggtccctagttctgggacagacaccagtacaaccttcccaacattgagtgagaccccatatgaaccagagactacagccacgtggctcactcatcctgcagaaaccagcacaacggtttctgggacaattcccaacttttcccataggggatcagacactgcaccctcaatggtcaccagtcctggagtagacacgaggtcaggtgttccaactacaaccatcccacccagtataccaggggtagtgacctcacaggtcactagttctgcaacagacactagtacagctattccaactttgactccttctcctggtgaaccagagaccacagcctcatcagctacccatcctgggacacagactggcttcactgttccaattcggactgttccctctagtgagccagatacaatggcttcctgggtcactcatcctccacagaccagcacacctgtttccagaacaacctccagtttttcccatagtagtccagatgccacacctgtaatggccaccagtcctaggacagaagccagttcagctgtactgacaacaatctcacctggtgcaccagagatggtgacttcacagatcactagttctggggcagcaaccagtacaactgttccaactttgactcattctcctggtatgccagagaccacagccttattgagcacccatcccagaacagagacaagtaaaacatttcctgcttcaactgtgtttcctcaagtatcagagaccacagcctcactcaccattagacctggtgcagagactagcacagctctcccaactcagacaacatcctctctcttcaccctacttgtaactggaaccagcagagttgatctaagtccaactgcttcacctggtgtttctgcaaaaacagccccactttccacccatccagggacagaaaccagcacaatgattccaacttcaactctttcccttggtttactagagactacaggcttactggccaccagctcttcagcagagaccagcacgagtactctaactctgactgtttcccctgctgtctctgggctttccagtgcctctataacaactgataagccccaaactgtgacctcctggaacacagaaacctcaccatctgtaacttcagttggacccccagaattttccaggactgtcacaggcaccactatgaccttgataccatcagagatgccaacaccacctaaaaccagtcatggagaaggagtgagtccaaccactatcttgagaactacaatggttgaagccactaatttagctaccacaggttccagtcccactgtggccaagacaacaaccaccttcaatacactggctggaagcctctttactcctctgaccacacctgggatgtccaccttggcctctgagagtgtgacctcaagaacaagttataaccatcggtcctggatctccaccaccagcagttataaccgtcggtactggacccctgccaccagcactccagtgacttctacattctccccagggatttccacatcctccatccccagctccacagcagccacagtcccattcatggtgccattcaccctcaacttcaccatcaccaacctgcagtacgaggaggacatgcggcaccctggttcaaggaagttcaacgccacagagagagaactgcagggtctgctcaaacccttgttcaggaatagcagtctggaatacctctattcaggctgcagactagcctcactcaggccagagaaggatagctcagccacggcagtggatgccatctgcacacatcgccctgaccctgaagacctcggactggacagagagcgactgtactgggagctgagcaatctgacaaatggcatccaggagctgggcccttacaccctggaccggaacagtctctatgtcaatggtttcacccatcgaagctctatgcccaccaccagcactcctgggacctccacagtggatgtgggaacctcagggactccatcctccagccccagccccacgactgctggccctctcctgatgccgttcaccctcaacttcaccatcaccaacctgcagtacgaggaggacatgcgtcgcactggctccaggaagttcaacaccatggagagtgtcctgcagggtctgctcaagccattgttcaagaacaccagtgttggccctttgtactctggctgcagattgaccttgctcaggcccgagaaagatggggcagccactggagtggatgccatctgcacccaccgccttgaccccaaaagccctggactcaacagggagcagctgtactgggagctaagcaaactgaccaatgacattgaagagctgggcccctacaccctggacaggaacagtctctatgtcaatggtttcacccatcagagctctgtgtccaccaccagcactcctgggacctccacagtggatctcagaacctcagggactccatcctccctctccagccccacaattatggctgctggccctctcctggtaccattcaccctcaacttcaccatcaccaacctgcagtatggggaggacatgggtcaccctggctccaggaagttcaacaccacagagagggtcctgcagggtctgcttggtcccatattcaagaacaccagtgttggccctctgtactctggctgcagactgacctctctcaggtccgagaaggatggagcagccactggagtggatgccatctgcatccatcatcttgaccccaaaagccctggactcaacagagagcggctgtactgggagctgagccaactgaccaatggcatcaaagagctgggcccctacaccctggacaggaacagtctctatgtcaatggtttcacccatcggacctctgtgcccaccaccagcactcctgggacctccacagtggaccttggaacctcagggactccattctccctcccaagccccgcaactgctggccctctcctggtgctgttcaccctcaacttcaccatcaccaacctgaagtatgaggaggacatgcatcgccctggctccaggaagttcaacaccactgagagggtcctgcagaccctggttggtcctatgttcaagaacaccagtgttggccttctgtactctggctgcagactgaccttgctcaggtccgagaaggatggagcagccactggagtggatgccatctgcacccaccgtcttgaccccaaaagccctggagtggacagggagcagctatactgggagctgagccaactgaccaatggcatcaaagagctgggcccctacaccctggacaggaacagtctctatgtcaatggtttcacccattggatccctgtgcccaccagcagcacccctgggacctccacagtggaccttgggtcagggactccatcctccctccccagccccacaagtgctactgctggccctctcctggtgccgttcaccctcaacttcaccatcaccaacctgaagtacgaggaggacatgcattgccctggctccaggaagttcaacaccacagagagagtcctgcagagtctgcttggtcccatgttcaagaacaccagtgttggccctctgtactctggctgcagactgaccttgctcaggtccgagaaggatggagcagccactggagtggatgccatctgcacccaccgtcttgaccccaaaagccctggagtggacagggagcagctatactgggagctgagccagctgaccaatggcatcaaagagctgggtccctacaccctggacagaaacagtctctatgtcaatggtttcacccatcagacctctgcgcccaacaccagcactcctgggacctccacagtggaccttgggacctcagggactccatcctccctccccagccctacatctgctggccctctcctggtgccattcaccctcaacttcaccatcaccaacctgcagtacgaggaggacatgcatcacccaggctccaggaagttcaacaccacggagcgggtcctgcagggtctgcttggtcccatgttcaagaacaccagtgtcggccttctgtactctggctgcagactgaccttgctcaggcctgagaagaatggggcagccactggaatggatgccatctgcagccaccgtcttgaccccaaaagccctggactcaacagagagcagctgtactgggagctgagccagctgacccatggcatcaaagagctgggcccctacaccctggacaggaacagtctctatgtcaatggtttcacccatcggagctctgtggcccccaccagcactcctgggacctccacagtggaccttgggacctcagggactccatcctccctccccagccccacaacagctgttcctctcctggtgccgttcaccctcaactttaccatcaccaatctgcagtatggggaggacatgcgtcaccctggctccaggaagttcaacaccacagagagggtcctgcagggtctgcttggtcccttgttcaagaactccagtgtcggccctctgtactctggctgcagactgatctctctcaggtctgagaaggatggggcagccactggagtggatgccatctgcacccaccaccttaaccctcaaagccctggactggacagggagcagctgtactggcagctgagccagatgaccaatggcatcaaagagctgggcccctacaccctggaccggaacagtctctacgtcaatggtttcacccatcggagctctgggctcaccaccagcactccttggacttccacagttgaccttggaacctcagggactccatcccccgtccccagccccacaactgctggccctctcctggtgccattcaccctaaacttcaccatcaccaacctgcagtatgaggaggacatgcatcgccctggatctaggaagttcaacgccacagagagggtcctgcagggtctgcttagtcccatattcaagaactccagtgttggccctctgtactctggctgcagactgacctctctcaggcccgagaaggatggggcagcaactggaatggatgctgtctgcctctaccaccctaatcccaaaagacctgggctggacagagagcagctgtactgggagctaagccagctgacccacaacatcactgagctgggcccctacagcctggacagggacagtctctatgtcaatggtttcacccatcagaactctgtgcccaccaccagtactcctgggacctccacagtgtactgggcaaccactgggactccatcctccttccccggccacacagagcctggccctctcctgataccattcactttcaactttaccatcaccaacctgcattatgaggaaaacatgcaacaccctggttccaggaagttcaacaccacggagagggttctgcagggtctgctcaagcccttgttcaagaacaccagtgttggccctctgtactctggctgcagactgaccttgctcagacctgagaagcaggaggcagccactggagtggacaccatctgtacccaccgcgttgatcccatcggacctggactggacagagagcggctatactgggagctgagccagctgaccaacagcatcacagagctgggaccctacaccctggatagggacagtctctatgtcaatggcttcaacccttggagctctgtgccaaccaccagcactcctgggacctccacagtgcacctggcaacctctgggactccatcctccctgcctggccacacagcccctgtccctctcttgataccattcaccctcaactttaccatcaccaacctgcattatgaagaaaacatgcaacaccctggttccaggaagttcaacaccacggagagggttctgcagggtctgctcaagcccttgttcaagagcaccagcgttggccctctgtactctggctgcagactgaccttgctcagacctgagaaacatggggcagccactggagtggacgccatctgcaccctccgccttgatcccactggtcctggactggacagagagcggctatactgggagctgagccagctgaccaacagcgttacagagctgggcccctacaccctggacagggacagtctctatgtcaatggcttcacccatcggagctctgtgccaaccaccagtattcctgggacctctgcagtgcacctggaaacctctgggactccagcctccctccctggccacacagcccctggccctctcctggtgccattcaccctcaacttcactatcaccaacctgcagtatgaggaggacatgcgtcaccctggttccaggaagttcaacaccacggagagagtcctgcagggtctgctcaagcccttgttcaagagcaccagtgttggccctctgtactctggctgcagactgaccttgctcaggcctgaaaaacgtggggcagccaccggcgtggacaccatctgcactcaccgccttgaccctctaaaccctggactggacagagagcagctatactgggagctgagcaaactgacccgtggcatcatcgagctgggcccctacctcctggacagaggcagtctctatgtcaatggtttcacccatcggaactttgtgcccatcaccagcactcctgggacctccacagtacacctaggaacctctgaaactccatcctccctacctagacccatagtgcctggccctctcctggtgccattcaccctcaacttcaccatcaccaacttgcagtatgaggaggccatgcgacaccctggctccaggaagttcaataccacggagagggtcctacagggtctgctcaggcccttgttcaagaataccagtatcggccctctgtactccagctgcagactgaccttgctcaggccagagaaggacaaggcagccaccagagtggatgccatctgtacccaccaccctgaccctcaaagccctggactgaacagagagcagctgtactgggagctgagccagctgacccacggcatcactgagctgggcccctacaccctggacagggacagtctctatgtcgatggtttcactcattggagccccataccaaccaccagcactcctgggacctccatagtgaacctgggaacctctgggatcccaccttccctccctgaaactacagccaccggccctctcctggtgccattcacactcaacttcaccatcactaacctacagtatgaggagaacatgggtcaccctggctccaggaagttcaacatcacggagagtgttctgcagggtctgctcaagcccttgttcaagagcaccagtgttggccctctgtattctggctgcagactgaccttgctcaggcctgagaaggacggagtagccaccagagtggacgccatctgcacccaccgccctgaccccaaaatccctgggctagacagacagcagctatactgggagctgagccagctgacccacagcatcactgagctgggaccctacaccctggatagggacagtctctatgtcaatggtttcacccagcggagctctgtgcccaccaccagcactcctgggactttcacagtacagccggaaacctctgagactccatcatccctccctggccccacagccactggccctgtcctgctgccattcaccctcaattttaccatcattaacctgcagtatgaggaggacatgcatcgccctggctccaggaagttcaacaccacggagagggtccttcagggtctgcttatgcccttgttcaagaacaccagtgtcagctctctgtactctggttgcagactgaccttgctcaggcctgagaaggatggggcagccaccagagtggatgctgtctgcacccatcgtcctgaccccaaaagccctggactggacagagagcggctgtactggaagctgagccagctgacccacggcatcactgagctgggcccctacaccctggacaggcacagtctctatgtcaatggtttcacccatcagagctctatgacgaccaccagaactcctgatacctccacaatgcacctggcaacctcgagaactccagcctccctgtctggacctacgaccgccagccctctcctggtgctattcacaattaacttcaccatcactaacctgcggtatgaggagaacatgcatcaccctggctctagaaagtttaacaccacggagagagtccttcagggtctgctcaggcctgtgttcaagaacaccagtgttggccctctgtactctggctgcagactgaccttgctcaggcccaagaaggatggggcagccaccaaagtggatgccatctgcacctaccgccctgatcccaaaagccctggactggacagagagcagctatactgggagctgagccagctaacccacagcatcactgagctgggcccctacaccctggacagggacagtctctatgtcaatggtttcacacagcggagctctgtgcccaccactagcattcctgggacccccacagtggacctgggaacatctgggactccagtttctaaacctggtccctcggctgccagccctctcctggtgctattcactctcaacttcaccatcaccaacctgcggtatgaggagaacatgcagcaccctggctccaggaagttcaacaccacggagagggtccttcagggcctgctcaggtccctgttcaagagcaccagtgttggccctctgtactctggctgcagactgactttgctcaggcctgaaaaggatgggacagccactggagtggatgccatctgcacccaccaccctgaccccaaaagccctaggctggacagagagcagctgtattgggagctgagccagctgacccacaatatcactgagctgggcccctatgccctggacaacgacagcctctttgtcaatggtttcactcatcggagctctgtgtccaccaccagcactcctgggacccccacagtgtatctgggagcatctaagactccagcctcgatatttggcccttcagctgccagccatctcctgatactattcaccctcaacttcaccatcactaacctgcggtatgaggagaacatgtggcctggctccaggaagttcaacactacagagagggtccttcagggcctgctaaggcccttgttcaagaacaccagtgttggccctctgtactctggctgcaggctgaccttgctcaggccagagaaagatggggaagccaccggagtggatgccatctgcacccaccgccctgaccccacaggccctgggctggacagagagcagctgtatttggagctgagccagctgacccacagcatcactgagctgggcccctacacactggacagggacagtctctatgtcaatggtttcacccatcggagctctgtacccaccaccagcaccggggtggtcagcgaggagccattcacactgaacttcaccatcaacaacctgcgctacatggcggacatgggccaacccggctccctcaagttcaacatcacagacaacgtcatgcagcacctgctcagtcctttgttccagaggagcagcctgggtgcacggtacacaggctgcagggtcatcgcactaaggtctgtgaagaacggtgctgagacacgggtggacctcctctgcacctacctgcagcccctcagcggcccaggtctgcctatcaagcaggtgttccatgagctgagccagcagacccatggcatcacccggctgggcccctactctctggacaaagacagcctctaccttaacggttacaatgaacctggtccagatgagcctcctacaactcccaagccagccaccacattcctgcctcctctgtcagaagccacaacagccatggggtaccacctgaagaccctcacactcaacttcaccatctccaatctccagtattcaccagatatgggcaagggctcagctacattcaactccaccgagggggtccttcagcacctgctcagacccttgttccagaagagcagcatgggccccttctacttgggttgccaactgatctccctcaggcctgagaaggatggggcagccactggtgtggacaccacctgcacctaccaccctgaccctgtgggccccgggctggacatacagcagctttactgggagctgagtcagctgacccatggtgtcacccaactgggcttctatgtcctggacagggatagcctcttcatcaatggctatgcaccccagaatttatcaatccggggcgagtaccagataaatttccacattgtcaactggaacctcagtaatccagaccccacatcctcagagtacatcaccctgctgagggacatccaggacaaggtcaccacactctacaaaggcagtcaactacatgacacattccgcttctgcctggtcaccaacttgacgatggactccgtgttggtcactgtcaaggcattgttctcctccaatttggaccccagcctggtggagcaagtctttctagataagaccctgaatgcctcattccattggctgggctccacctaccagttggtggacatccatgtgacagaaatggagtcatcagtttatcaaccaacaagcagctccagcacccagcacttctacctgaatttcaccatcaccaacctaccatattcccaggacaaagcccagccaggcaccaccaattaccagaggaacaaaaggaatattgaggatgcgctcaaccaactcttccgaaacagcagcatcaagagttatttttctgactgtcaagtttcaacattcaggtctgtccccaacaggcaccacaccggggtggactccctgtgtaacttctcgccactggctcggagagtagacagagttgccatctatgaggaatttctgcggatgacccggaatggtacccagctgcagaacttcaccctggacaggagcagtgtccttgtggatgggtattctcccaacagaaatgagcccttaactgggaattctgaccttcccttctgggctgtcatcctcatcggcttggcaggactcctgggactcatcacatgcctgatctgcggtgtcctggtgaccacccgccggcggaagaaggaaggagaatacaacgtccagcaacagtgcccaggctactaccagtcacacctagacctggaggatctgcaatgactggaacttgccggtgcctggggtgcctttcccccagccagggtccaaagaagcttggctggggcagaaataaaccatattggtcggaaaaaaaaaaaaaaaaaaaaaaaaaaaaaaaaaaaaa

SEQ ID NO: 87 - protein, 6995 aa, Homo sapiens
PVTSLLTPGLVITTDRMGISREPGTSSTSNLSSTSHERLTTLEDTVDTEAMQPSTHTAVTNVRTSISGHESQSSVLSDSETPKATSPMGTTYTMGETSVSISTSDFFETSRIQIEPTSSLTSGLRETSSSERISSATEGSTVLSEVPSGATTEVSRTEVISSRGTSMSGPDQFTISPDISTEAITRLSTSPIMTESAESAITIETGSPGATSEGTLTLDTSTTTFWSGTHSTASPGFSHSEMTTLMSRTPGDVPWPSLPSVEEASSVSSSLSSPAMTSTSFFSTLPESISSSPHPVTALLTLGPVKTTDMLRTSSEPETSSPPNLSSTSAEILATSEVTKDREKIHPSSNTPVVNVGTVIYKHLSPSSVLADLVTTKPTSPMATTSTLGNTSVSTSTPAFPETMMTQPTSSLTSGLREISTSQETSSATERSASLSGMPTGATTKVSRTEALSLGRTSTPGPAQSTISPEISTETITRISTPLTTTGSAEMTITPKTGHSGASSQGTFTLDTSSRASWPGTHSAATHRSPHSGMTTPMSRGPEDVSWPSRPSVEKTSPPSSLVSLSAVTSPSPLYSTPSESSHSSPLRVTSLFTPVMMKTTDMLDTSLEPVTTSPPSMNITSDESLATSKATMETEAIQLSENTAVTQMGTISARQEFYSSYPGLPEPSKVTSPVVTSSTIKDIVSTTIPASSEITRIEMESTSTLTPTPRETSTSQEIHSATKPSTVPYKALTSATIEDSMTQVMSSSRGPSPDQSTMSQDISTEVITRLSTSPIKTESTEMTITTQTGSPGATSRGTLTLDTSTTFMSGTHSTASQGFSHSQMTALMSRTPGEVPWLSHPSVEEASSASFSLSSPVMTSSSPVSSTLPDSIHSSSLPVTSLLTSGLVKTTELLGTSSEPETSSPPNLSSTSAEILATTEVTTDTEKLEMTNVVTSGYTHESPSSVLADSVTTKATSSMGITYPTGDTNVLTSTPAFSDTSRIQTKSKLSLTPGLMETSISEETSSATEKSTVLSSVPTGATTEVSRTEAISSSRTSIPGPAQSTMSSDTSMETITRISTPLTRKESTDMAITPKTGPSGATSQGTFTLDSSSTASWPGTHSATTQRFPRSVVTTPMSRGPEDVSWPSPLSVEKNSPPSSLVSSSSVTSPSPLYSTPSGSSHSSPVPVTSLFTSIMMKATDMLDASLEPETTSAPNMNITSDESLAASKATTETEAIHVFENTAASHVETTSATEELYSSSPGFSEPTKVISPVVTSSSIRDNMVSTTMPGSSGITRIEIESMSSLTPGLRETRTSQDITSSTETSTVLYKMPSGATPEVSRTEVMPSSRTSIPGPAQSTMSLDISDEVVTRLSTSPIMTESAEITITTQTGYSLATSQVTLPLGTSMTFLSGTHSTMSQGLSHSEMTNLMSRGPESLSWTSPRFVETTRSSSSLTSLPLTTSLSPVSSTLLDSSPSSPLPVTSLILPGLVKTTEVLDTSSEPKTSSSPNLSSTSVEIPATSEIMTDTEKIHPSSNTAVAKVRTSSSVHESHSSVLADSETTITIPSMGITSAVEDTTVFTSNPAFSETRRIPTEPTFSLTPGFRETSTSEETTSITETSAVLFGVPTSATTEVSMTEIMSSNRTHIPDSDQSTMSPDIITEVITRLSSSSMMSESTQMTITTQKSSPGATAQSTLTLATTTAPLARTHSTVPPRFLHSEMTTLMSRSPENPSWKSSPFVEKTSSSSSLLSLPVTTSPSVSSTLPQSIPSSSFSVTSLLTPGMVKTTDTSTEPGTSLSPNLSGTSVEILAASEVTTDTEKIHPSSSMAVTNVGTTSSGHELYSSVSIHSEPSKATYPVGTPSSMAETSISTSMPANFETTGFEAEPFSHLTSGLRKTNMSLDTSSVTPTNTPSSPGSTHLLQSSKTDFTSSAKTSSPDWPPASQYTEIPVDIITPFNASPSITESTGITSFPESRFTMSVTESTHHLSTDLLPSAETISTGTVMPSLSEAMTSFATTGVPRAISGSGSPFSRTESGPGDATLSTIAESLPSSTPVPFSSSTFTTTDSSTIPALHEITSSSATPYRVDTSLGTESSTTEGRLVMVSTLDTSSQPGRTSSSPILDTRMTESVELGTVTSAYQVPSLSTRLTRTDGIMEHITKIPNEAAHRGTIRPVKGPQTSTSPASPKGLHTGGTKRMETTTTALKTTTTALKTTSRATLTTSVYTPTLGTLTPLNASMQMASTIPTEMMITTPYVFPDVPETTSSLATSLGAETSTALPRTTPSVFNRESETTASLVSRSGAERSPVIQTLDVSSSEPDTTASWVIHPAETIPTVSKTTPNFFHSELDTVSSTATSHGADVSSAIPTNISPSELDALTPLVTISGTDTSTTFPTLTKSPHETETRTTWLTHPAETSSTIPRTIPNFSHHESDATPSIATSPGAETSSAIPIMTVSPGAEDLVTSQVTSSGTDRNMTIPTLTLSPGEPKTIASLVTHPEAQTSSAIPTSTISPAVSRLVTSMVTSLAAKTSTTNRALTNSPGEPATTVSLVTHSAQTSPTVPWTTSIFFHSKSDTTPSMTTSHGAESSSAVPTPTVSTEVPGVVTPLVTSSRAVISTTIPILTLSPGEPETTPSMATSHGEEASSAIPTPTVSPGVPGVVTSLVTSSRAVTSTTIPILTFSLGEPETTPSMATSHGTEAGSAVPTVLPEVPGMVTSLVASSRAVTSTTLPTLTLSPGEPETTPSMATSHGAEASSTVPTVSPEVPGVVTSLVTSSSGVNSTSIPTLILSPGELETTPSMATSHGAEASSAVPTPTVSPGVSGVVTPLVTSSRAVTSTTIPILTLSSSEPETTPSMATSHGVEASSAVLTVSPEVPGMVTFLVTSSRAVTSTTIPTLTISSDEPETTTSLVTHSEAKMISAIPTLGVSPTVQGLVTSLVTSSGSETSAFSNLTVASSQPETIDSWVAHPGTEASSVVPTLTVSTGEPFTNISLVTHPAESSSTLPRTTSRFSHSELDTMPSTVTSPEAESSSAISTTISPGIPGVLTSLVTSSGRDISATFPTVPESPHESEATASWVTHPAVTSTTVPRTTPNYSHSEPDTTPSIATSPGAEATSDFPTITVSPDVPDMVTSQVTSSGTDTSITIPTLTLSSGEPETTTSFITYSETHTSSAIPTLPVSPDASKMLTSLVISSGTDSTTTFPTLTETPYEPETTAIQLIHPAETNTMVPRTTPKFSHSKSDTTLPVAITSPGPEASSAVSTTTISPDMSDLVTSLVPSSGTDTSTTFPTLSETPYEPETTATWLTHPAETSTTVSGTIPNFSHRGSDTAPSMVTSPGVDTRSGVPTTTIPPSIPGVVTSQVTSSATDTSTAIPTLTPSPGEPETTASSATHPGTQTGFTVPIRTVPSSEPDTMASWVTHPPQTSTPVSRTTSSFSHSSPDATPVMATSPRTEASSAVLTTISPGAPEMVTSQITSSGAATSTTVPTLTHSPGMPETTALLSTHPRTETSKTFPASTVFPQVSETTASLTIRPGAETSTALPTQTTSSLFTLLVTGTSRVDLSPTASPGVSAKTAPLSTHPGTETSTMIPTSTLSLGLLETTGLLATSSSAETSTSTLTLTVSPAVSGLSSASITTDKPQTVTSWNTETSPSVTSVGPPEFSRTVTGTTMTLIPSEMPTPPKTSHGEGVSPTTILRTTMVEATNLATTGSSPTVAKTTTTFNTLAGSLFTPLTTPGMSTLASESVTSRTSYNHRSWISTTSSYNRRYWTPATSTPVTSTFSPGISTSSIPSSTAATVPFMVPFTLNFTITNLQYEEDMRHPGSRKFNATERELQGLLKPLFRNSSLEYLYSGCRLASLRPEKDSSATAVDAICTHRPDPEDLGLDRERLYWELSNLTNGIQELGPYTLDRNSLYVNGFTHRSSMPTTSTPGTSTVDVGTSGTPSSSPSPTTAGPLLMPFTLNFTITNLQYEEDMRRTGSRKFNTMESVLQGLLKPLFKNTSVGPLYSGCRLTLLRPEKDGAATGVDAICTHRLDPKSPGLNREQLYWELSKLTNDIEELGPYTLDRNSLYVNGFTHQSSVSTTSTPGTSTVDLRTSGTPSSLSSPTIMAAGPLLVPFTLNFTITNLQYGEDMGHPGSRKFNTTERVLQGLLGPIFKNTSVGPLYSGCRLTSLRSEKDGAATGVDAICIHHLDPKSPGLNRERLYWELSQLTNGIKELGPYTLDRNSLYVNGFTHRTSVPTTSTPGTSTVDLGTSGTPFSLPSPATAGPLLVLFTLNFTITNLKYEEDMHRPGSRKFNTTERVLQTLVGPMFKNTSVGLLYSGCRLTLLRSEKDGAATGVDAICTHRLDPKSPGVDREQLYWELSQLTNGIKELGPYTLDRNSLYVNGFTHWIPVPTSSTPGTSTVDLGSGTPSSLPSPTSATAGPLLVPFTLNFTITNLKYEEDMHCPGSRKFNTTERVLQSLLGPMFKNTSVGPLYSGCRLTLLRSEKDGAATGVDAICTHRLDPKSPGVDREQLYWELSQLTNGIKELGPYTLDRNSLYVNGFTHQTSAPNTSTPGTSTVDLGTSGTPSSLPSPTSAGPLLVPFTLNFTITNLQYEEDMHHPGSRKFNTTERVLQGLLGPMFKNTSVGLLYSGCRLTLLRPEKNGAATGMDAICSHRLDPKSPGLNREQLYWELSQLTHGIKELGPYTLDRNSLYVNGFTHRSSVAPTSTPGTSTVDLGTSGTPSSLPSPTTAVPLLVPFTLNFTITNLQYGEDMRHPGSRKFNTTERVLQGLLGPLFKNSSVGPLYSGCRLISLRSEKDGAATGVDAICTHHLNPQSPGLDREQLYWQLSQMTNGIKELGPYTLDRNSLYVNGFTHRSSGLTTSTPWTSTVDLGTSGTPSPVPSPTTAGPLLVPFTLNFTITNLQYEEDMHRPGSRKFNATERVLQGLLSPIFKNSSVGPLYSGCRLTSLRPEKDGAATGMDAVCLYHPNPKRPGLDREQLYWELSQLTHNITELGPYSLDRDSLYVNGFTHQNSVPTTSTPGTSTVYWATTGTPSSFPGHTEPGPLLIPFTFNFTITNLHYEENMQHPGSRKFNTTERVLQGLLKPLFKNTSVGPLYSGCRLTLLRPEKQEAATGVDTICTHRVDPIGPGLDRERLYWELSQLTNSITELGPYTLDRDSLYVNGFNPWSSVPTTSTPGTSTVHLATSGTPSSLPGHTAPVPLLIPFTLNFTITNLHYEENMQHPGSRKFNTTERVLQGLLKPLFKSTSVGPLYSGCRLTLLRPEKHGAATGVDAICTLRLDPTGPGLDRERLYWELSQLTNSVTELGPYTLDRDSLYVNGFTHRSSVPTTSIPGTSAVHLETSGTPASLPGHTAPGPLLVPFTLNFTITNLQYEEDMRHPGSRKFNTTERVLQGLLKPLFKSTSVGPLYSGCRLTLLRPEKRGAATGVDTICTHRLDPLNPGLDREQLYWELSKLTRGIIELGPYLLDRGSLYVNGFTHRNFVPITSTPGTSTVHLGTSETPSSLPRPIVPGPLLVPFTLNFTITNLQYEEAMRHPGSRKFNTTERVLQGLLRPLFKNTSIGPLYSSCRLTLLRPEKDKAATRVDAICTHHPDPQSPGLNREQLYWELSQLTHGITELGPYTLDRDSLYVDGFTHWSPIPTTSTPGTSIVNLGTSGIPPSLPETTATGPLLVPFTLNFTITNLQYEENMGHPGSRKFNITESVLQGLLKPLFKSTSVGPLYSGCRLTLLRPEKDGVATRVDAICTHRPDPKIPGLDRQQLYWELSQLTHSITELGPYTLDRDSLYVNGFTQRSSVPTTSTPGTFTVQPETSETPSSLPGPTATGPVLLPFTLNFTIINLQYEEDMHRPGSRKFNTTERVLQGLLMPLFKNTSVSSLYSGCRLTLLRPEKDGAATRVDAVCTHRPDPKSPGLDRERLYWKLSQLTHGITELGPYTLDRHSLYVNGFTHQSSMTTTRTPDTSTMHLATSRTPASLSGPTTASPLLVLFTINFTITNLRYEENMHHPGSRKFNTTERVLQGLLRPVFKNTSVGPLYSGCRLTLLRPKKDGAATKVDAICTYRPDPKSPGLDREQLYWELSQLTHSITELGPYTLDRDSLYVNGFTQRSSVPTTSIPGTPTVDLGTSGTPVSKPGPSAASPLLVLFTLNFTITNLRYEENMQHPGSRKFNTTERVLQGLLRSLFKSTSVGPLYSGCRLTLLRPEKDGTATGVDAICTHHPDPKSPRLDREQLYWELSQLTHNITELGPYALDNDSLFVNGFTHRSSVSTTSTPGTPTVYLGASKTPASIFGPSAASHLLILFTLNFTITNLRYEENMWPGSRKFNTTERVLQGLLRPLFKNTSVGPLYSGCRLTLLRPEKDGEATGVDAICTHRPDPTGPGLDREQLYLELSQLTHSITELGPYTLDRDSLYVNGFTHRSSVPTTSTGVVSEEPFTLNFTINNLRYMADMGQPGSLKFNITDNVMQHLLSPLFQRSSLGARYTGCRVIALRSVKNGAETRVDLLCTYLQPLSGPGLPIKQVFHELSQQTHGITRLGPYSLDKDSLYLNGYNEPGPDEPPTTPKPATTFLPPLSEATTAMGYHLKTLTLNFTISNLQYSPDMGKGSATFNSTEGVLQHLLRPLFQKSSMGPFYLGCQLISLRPEKDGAATGVDTTCTYHPDPVGPGLDIQQLYWELSQLTHGVTQLGFYVLDRDSLFINGYAPQNLSIRGEYQINFHIVNWNLSNPDPTSSEYITLLRDIQDKVTTLYKGSQLHDTFRFCLVTNLTMDSVLVTVKALFSSNLDPSLVEQVFLDKTLNASFHWLGSTYQLVDIHVTEMESSVYQPTSSSSTQHFYLNFTITNLPYSQDKAQPGTTNYQRNKRNIEDALNQLFRNSSIKSYFSDCQVSTFRSVPNRHHTGVDSLCNFSPLARRVDRVAIYEEFLRMTRNGTQLQNFTLDRSSVLVDGYSPNRNEPLTGNSDLPFWAVILIGLAGLLGLITCLICGVLVTTRRRKKEGEYNVQQQCPGYYQSHLDLEDLQ

SEQ ID NO: 88 - DNA, 2187 bp, Homo sapiens
tgccaggctctccacccccacttcccaattgaggaaaccgaggcagaggaggctcagcgccacgcactcctctttctgcctggccggccactcccgtctgctgtgacgcgcggacagagagctaccggtggacccacggtgcctccctccctgggatctacacagaccatggccttgccaacggctcgacccctgttggggtcctgtgggacccccgccctcggcagcctcctgttcctgctcttcagcctcggatgggtgcagccctcgaggaccctggctggagagacagggcaggaggctgcgcccctggacggagtcctggccaacccacctaacatttccagcctctcccctcgccaactccttggcttcccgtgtgcggaggtgtccggcctgagcacggagcgtgtccgggagctggctgtggccttggcacagaagaatgtcaagctctcaacagagcagctgcgctgtctggctcaccggctctctgagccccccgaggacctggacgccctcccattggacctgctgctattcctcaacccagatgcgttctcggggccccaggcctgcacccgtttcttctcccgcatcacgaaggccaatgtggacctgctcccgaggggggctcccgagcgacagcggctgctgcctgcggctctggcctgctggggtgtgcgggggtctctgctgagcgaggctgatgtgcgggctctgggaggcctggcttgcgacctgcctgggcgctttgtggccgagtcggccgaagtgctgctaccccggctggtgagctgcccgggacccctggaccaggaccagcaggaggcagccagggcggctctgcagggcgggggacccccctacggccccccgtcgacatggtctgtctccacgatggacgctctgcggggcctgctgcccgtgctgggccagcccatcatccgcagcatcccgcagggcatcgtggccgcgtggcggcaacgctcctctcgggacccatcctggcggcagcctgaacggaccatcctccggccgcggttccggcgggaagtggagaagacagcctgtccttcaggcaagaaggcccgcgagatagacgagagcctcatcttctacaagaagtgggagctggaagcctgcgtggatgcggccctgctggccacccagatggaccgcgtgaacgccatccccttcacctacgagcagctggacgtcctaaagcataaactggatgagctctacccacaaggttaccccgagtctgtgatccagcacctgggctacctcttcctcaagatgagccctgaggacattcgcaagtggaatgtgacgtccctggagaccctgaaggctttgcttgaagtcaacaaagggcacgaaatgagtcctcaggtggccaccctgatcgaccgctttgtgaagggaaggggccagctagacaaagacaccctagacaccctgaccgccttctaccctgggtacctgtgctccctcagccccgaggagctgagctccgtgccccccagcagcatctgggcggtcaggccccaggacctggacacgtgtgacccaaggcagctggacgtcctctatcccaaggcccgccttgctttccagaacatgaacgggtccgaatacttcgtgaagatccagtccttcctgggtggggcccccacggaggatttgaaggcgctcagtcagcagaatgtgagcatggacttggccacgttcatgaagctgcggacggatgcggtgctgccgttgactgtggctgaggtgcagaaacttctgggaccccacgtggagggcctgaaggcggaggagcggcaccgcccggtgcgggactggatcctacggcagcggcaggacgacctggacacgctggggctggggctacagggcggcatccccaacggctacctggtcctagacctcagcatgcaagaggccctctcggggacgccctgcctcctaggacctggacctgttctcaccgtcctggcactgctcctagcctccaccctggcctgagggccccactcccttgctggccccagccctgctggggatccccgcctggccaggagcaggcacgggtggtccccgttccaccccaagagaactcgcgctcagtaaacgggaacatgccccctgcagacacgtaaaaaaaaaaaaaaaaaa

SEQ ID NO: 89 - protein, 622 aa, Homo sapiens
MALPTARPLLGSCGTPALGSLLFLLFSLGWVQPSRTLAGETGQEAAPLDGVLANPPNISSLSPRQLLGFPCAEVSGLSTERVRELAVALAQKNVKLSTEQLRCLAHRLSEPPEDLDALPLDLLLFLNPDAFSGPQACTRFFSRITKANVDLLPRGAPERQRLLPAALACWGVRGSLLSEADVRALGGLACDLPGRFVAESAEVLLPRLVSCPGPLDQDQQEAARAALQGGGPPYGPPSTWSVSTMDALRGLLPVLGQPIIRSIPQGIVAAWRQRSSRDPSWRQPERTILRPRFRREVEKTACPSGKKAREIDESLIFYKKWELEACVDAALLATQMDRVNAIPFTYEQLDVLKHKLDELYPQGYPESVIQHLGYLFLKMSPEDIRKWNVTSLETLKALLEVNKGHEMSPQVATLIDRFVKGRGQLDKDTLDTLTAFYPGYLCSLSPEELSSVPPSSIWAVRPQDLDTCDPRQLDVLYPKARLAFQNMNGSEYFVKIQSFLGGAPTEDLKALSQQNVSMDLATFMKLRTDAVLPLTVAEVQKLLGPHVEGLKAEERHRPVRDWILRQRQDDLDTLGLGLQGGIPNGYLVLDLSMQEALSGTPCLLGPGPVLTVLALLLASTLA

SEQ ID NO: 90 - DNA, 4167 bp, Homo sapiens
accttcgccatatatacccggggcgctgcgctccacctggccgccgcctccagcccagcacctgcggagggagcgctgaccatggctccctggcctgaattgggagatgcccagcccaaccccgataagtacctcgaaggggccgcaggtcagcagcccactgcccctgataaaagcaaagagaccaacaaaacagataacactgaggcacctgtaaccaagattgaacttctgccgtcctactccacggctacactgatagatgagcccactgaggtggatgacccctggaacctacccactcttcaggactcggggatcaagtggtcagagagagacaccaaagggaagattctctgtttcttccaagggattgggagattgattttacttctcggatttctctactttttcgtgtgctccctggatattcttagtagcgccttccagctggttggaggaaaaatggcaggacagttcttcagcaacagctctattatgtccaaccctttgttggggctggtgatcggggtgctggtgaccgtcttggtgcagagctccagcacctcaacgtccatcgttgtcagcatggtgtcctcttcattgctcactgttcgggctgccatccccattatcatgggggccaacattggaacgtcaatcaccaacactattgttgcgctcatgcaggtgggagatcggagtgagttcagaagagcttttgcaggagccactgtccatgacttcttcaactggctgtccgtgttggtgctcttgcccgtggaggtggccacccattacctcgagatcataacccagcttatagtggagagcttccacttcaagaatggagaagatgccccagatcttctgaaagtcatcactaagcccttcacaaagctcattgtccagctggataaaaaagttatcagccaaattgcaatgaacgatgaaaaagcgaaaaacaagagtcttgtcaagatttggtgcaaaacttttaccaacaagacccagattaacgtcactgttccctcgactgctaactgcacctccccttccctctgttggacggatggcatccaaaactggaccatgaagaatgtgacctacaaggagaacatcgccaaatgccagcatatctttgtgaatttccacctcccggatcttgctgtgggcaccatcttgctcatactctccctgctggtcctctgtggttgcctgatcatgattgtcaagatcctgggctctgtgctcaaggggcaggtcgccactgtcatcaagaagaccatcaacactgatttcccctttccctttgcatggttgactggctacctggccatcctcgtcggggcaggcatgaccttcatcgtacagagcagctctgtgttcacgtcggccttgacccccctgattggaatcggcgtgataaccattgagagggcttatccactcacgctgggctccaacatcggcaccaccaccaccgccatcctggccgccttagccagccctggcaatgcattgaggagttcactccagatcgccctgtgccactttttcttcaacatctccggcatcttgctgtggtacccgatcccgttcactcgcctgcccatccgcatggccaaggggctgggcaacatctctgccaagtatcgctggttcgccgtcttctacctgatcatcttcttcttcctgatcccgctgacggtgtttggcctctcgctggccggctggcgggtgctggttggtgtcggggttcccgtcgtcttcatcatcatcctggtactgtgcctccgactcctgcagtctcgctgcccacgcgtcctgccgaagaaactccagaactggaacttcctgccgctgtggatgcgctcgctgaagccctgggatgccgtcgtctccaagttcaccggctgcttccagatgcgctgctgctgctgctgccgcgtgtgctgccgcgcgtgctgcttgctgtgtggctgccccaagtgctgccgctgcagcaagtgctgcgaggacttggaggaggcgcaggaggggcaggatgtccctgtcaaggctcctgagacctttgataacataaccattagcagagaggctcagggtgaggtccctgcctcggactcaaagaccgaatgcacggccttgtaggggacgccccagattgtcagggatggggggatggtccttgagttttgcatgctctcctccctcccacttctgcaccctttcaccacctcgaggagatttgctccccattagcgaatgaaattgatgcagtcctacctaactcgattccctttggcttggtggtaggcctgcagggcacttttattccaacccctggtcactcagtaatcttttactccaggaaggcacaggatggtacctaaagagaattagagaatgaacctggcgggacggatgtctaatcctgcgcctagctgggttggtcagtagaacctattttcagactcaaaaaccatcttcagaaagaaaaggcccagggaaggaatgtatgagaggctctcccagatgaggaagtgtactctctatgactatcaagctcaggcctctccctttttttaaaccaaagtctggcaaccaagagcagcagctccatggcctccttgccccagatcagcctgggtcaggggacatagtgtcattgtttggaaactgcagaccacaaggtgtgggtctatcccacttcctagtgctccccacattccccatcagggcttcctcacgtggacaggtgtgctagtccaggcagttcacttgcagtttccttgtcctcatgcttcggggatgggagccacgcctgaactagagttcaggctggatacatgtgctcacctgctgctcttgtcttcctaagagacagagagtggggcagatggaggagaagaaagtgaggaatgagtagcatagcattctgccaaaagggccccagattcttaatttagcaaactaagaagcccaattcaaaagcattgtggctaaagtctaacgctcctctcttggtcagataacaaaagccctccctgttggatcttttgaaataaaacgtgcaagttatccaggctcgtagcctgcatgctgccaccttgaatcccagggagtatctgcacctggaatagctctccacccctctctgcctccttactttctgtgcaagatgacttcctgggttaacttccttctttccatccacccacccactggaatctctttccaaacatttttccattttcccacagatgggctttgattagctgtcctctctccatgcctgcaaagctccagatttttggggaaagctgtacccaactggactgcccagtgaactgggatcattaagtacagtcgagcacacgtgtgtgcatgggtcaaaggggtgtgttccttctcatcctagatgccttctctgtgccttccacagcctcctgcctgattacaccactgcccccgccccaccctcagccatcccaattcttcctggccagtgcgctccagccttatctaggaaaggaggagtgggtgtagccgtgcagcaagattggggcctcccccatcccagcttctccaccatcccagcaagtcaggatatcagacagtcctcccctgaccctcccccttgtagatatcaattcccaaacagagccaaatactctatatctatagtcacagccctgtacagcatttttcataagttatatagtaaatggtctgcatgatttgtgcttctagtgctctcatttggaaatgaggcaggcttcttctatgaaatgtaaagaaagaaaccactttgtatattttgtaataccacctctgtggccatgcctgccccgcccactctgtatatatgtaagttaaacccgggcaggggctgtggccgtctttgtactctggtgatttttaaaaattgaatctttgtacttgcattgattgtataataattttgagaccaggtctcgctgtgttgctcaggctggtctcaaactcctgagatcaagcaatccgcccacctcagcctcccaaagtgctgagatcacaggcgtgagccaccaccaggcctgattgtaatttttttttttttttttttactggttatgggaagggagaaataaaatcatcaaacccaaaaaaaaaaaaaaaaaa

SEQ ID NO: 91 - protein, 690 aa, Homo sapiens
MAPWPELGDAQPNPDKYLEGAAGQQPTAPDKSKETNKTDNTEAPVTKIELLPSYSTATLIDEPTEVDDPWNLPTLQDSGIKWSERDTKGKILCFFQGIGRLILLLGFLYFFVCSLDILSSAFQLVGGKMAGQFFSNSSIMSNPLLGLVIGVLVTVLVQSSSTSTSIVVSMVSSSLLTVRAAIPIIMGANIGTSITNTIVALMQVGDRSEFRRAFAGATVHDFFNWLSVLVLLPVEVATHYLEIITQLIVESFHFKNGEDAPDLLKVITKPFTKLIVQLDKKVISQIAMNDEKAKNKSLVKIWCKTFTNKTQINVTVPSTANCTSPSLCWTDGIQNWTMKNVTYKENIAKCQHIFVNFHLPDLAVGTILLILSLLVLCGCLIMIVKILGSVLKGQVATVIKKTINTDFPFPFAWLTGYLAILVGAGMTFIVQSSSVFTSALTPLIGIGVITIERAYPLTLGSNIGTTTTAILAALASPGNALRSSLQIALCHFFFNISGILLWYPIPFTRLPIRMAKGLGNISAKYRWFAVFYLIIFFFLIPLTVFGLSLAGWRVLVGVGVPVVFIIILVLCLRLLQSRCPRVLPKKLQNWNFLPLWMRSLKPWDAVVSKFTGCFQMRCCCCCRVCCRACCLLCGCPKCCRCSKCCEDLEEAQEGQDVPVKAPETFDNITISREAQGEVPASDSKTECTAL

SEQ ID NO: 92 - DNA, 4559 bp, Homo sapiens
gcggccgccccattcccagaccggccgccagcccatctggttagctcccgccgctccgcgccgcccgggagtcgggagccgcggggaaccgggcacctgcacccgcctctgggagtgagtggttccagctggtgcctggcctgtgtctcttggatgccctgtggcttcagtccgtctcctgttgcccaccacctcgtccctgggccgcctgataccccagcccaacagctaaggtgtggatggacagtagggggctggcttctctcactggtcaggggtcttctcccctgtctgcctcccggagctaggactgcagaggggcctatcatggtgcttgcaggccccctggctgtctcgctgttgctgcccagcctcacactgctggtgtcccacctctccagctcccaggatgtctccagtgagcccagcagtgagcagcagctgtgcgcccttagcaagcaccccaccgtggcctttgaagacctgcagccgtgggtctctaacttcacctaccctggagcccgggatttctcccagctggctttggacccctccgggaaccagctcatcgtgggagccaggaactacctcttcagactcagccttgccaatgtctctcttcttcaggccacagagtgggcctccagtgaggacacgcgccgctcctgccaaagcaaagggaagactgaggaggagtgtcagaactacgtgcgagtcctgatcgtcgccggccggaaggtgttcatgtgtggaaccaatgccttttcccccatgtgcaccagcagacaggtggggaacctcagccggactactgagaagatcaatggtgtggcccgctgcccctatgacccacgccacaactccacagctgtcatctcctcccagggggagctctatgcagccacggtcatcgacttctcaggtcgggaccctgccatctaccgcagcctgggcagtgggccaccgcttcgcactgcccaatataactccaagtggcttaatgagccaaacttcgtggcagcctatgatattgggctgtttgcatacttcttcctgcgggagaacgcagtggagcacgactgtggacgcaccgtgtactctcgcgtggcccgcgtgtgcaagaatgacgtggggggccgattcctgctggaggacacatggaccacattcatgaaggcccggctcaactgctcccgcccgggcgaggtccccttctactataacgagctgcagagtgccttccacttgccagagcaggacctcatctatggagttttcacaaccaacgtaaacagcatcgcggcttctgctgtctgcgccttcaacctcagtgctatctcccaggctttcaatggcccatttcgctaccaggagaaccccagggctgcctggctccccatagccaaccccatccccaatttccagtgtggcaccctgcctgagaccggtcccaacgagaacctgacggagcgcagcctgcaggacgcgcagcgcctcttcctgatgagcgaggccgtgcagccggtgacacccgagccctgtgtcacccaggacagcgtgcgcttctcacacctcgtggtggacctggtgcaggctaaagacacgctctaccatgtactctacattggcaccgagtcgggcaccatcctgaaggcgctgtccacggcgagccgcagcctccacggctgctacctggaggagctgcacgtgctgccccccgggcgccgcgagcccctgcgcagcctgcgcatcctgcacagcgcccgcgcgctcttcgtggggctgagagacggcgtcctgcgggtcccactggagaggtgcgccgcctaccgcagccagggggcatgcctgggggcccgggacccgtactgtggctgggacgggaagcagcaacgttgcagcacactcgaggacagctccaacatgagcctctggacccagaacatcaccgcctgtcctgtgcggaatgtgacacgggatgggggcttcggcccatggtcaccatggcaaccatgtgagcacttggatggggacaactcaggctcttgcctgtgtcgagctcgatcctgtgattcccctcgaccccgctgtgggggccttgactgcctggggccagccatccacatcgccaactgctccaggaatggggcgtggaccccgtggtcatcgtgggcgctgtgcagcacgtcctgtggcatcggcttccaggtccgccagcgaagttgcagcaaccctgctccccgccacgggggccgcatctgcgtgggcaagagccgggaggaacggttctgtaatgagaacacgccttgcccggtgcccatcttctgggcttcctggggctcctggagcaagtgcagcagcaactgtggagggggcatgcagtcgcggcgtcgggcctgcgagaacggcaactcctgcctgggctgcggcgtggagttcaagacgtgcaaccccgagggctgccccgaagtgcggcgcaacaccccctggacgccgtggctgcccgtgaacgtgacgcagggcggggcacggcaggagcagcggttccgcttcacctgccgcgcgccccttgcagacccgcacggcctgcagttcggcaggagaaggaccgagacgaggacctgtcccgcggacggctccggctcctgcgacaccgacgccctggtggaggacctcctgcgcagcgggagcacctccccgcacacggtgagcgggggctgggccgcctggggcccgtggtcgtcctgctcccgggactgcgagctgggcttccgcgtccgcaagagaacgtgcactaacccggagccccgcaacgggggcctgccctgcgtgggcgatgctgccgagtaccaggactgcaacccccaggcttgcccagttcggggtgcttggtcctgctggacctcatggtctccatgctcagcttcctgtggtgggggtcactatcaacgcacccgttcctgcaccagccccgcaccctccccaggtgaggacatctgtctcgggctgcacacggaggaggcactatgtgccacacaggcctgcccagaaggctggtcgccctggtctgagtggagtaagtgcactgacgacggagcccagagccgaagccggcactgtgaggagctcctcccagggtccagcgcctgtgctggaaacagcagccagagccgcccctgcccctacagcgagattcccgtcatcctgccagcctccagcatggaggaggccaccggctgtgcagggttcaatctcatccacttggtggccacgggcatctcctgcttcttgggctctgggctcctgaccctagcagtgtacctgtcttgccagcactgccagcgtcagtcccaggagtccacactggtccatcctgccacccccaaccatttgcactacaagggcggaggcaccccgaagaatgaaaagtacacacccatggaattcaagaccctgaacaagaataacttgatccctgatgacagagccaacttctacccattgcagcagaccaatgtgtacacgactacttactacccaagccccctgaacaaacacagcttccggcccgaggcctcacctggacaacggtgcttccccaacagctgataccgccgtcctggggacttgggcttcttgccttcataaggcacagagcagatggagatgggacagtggagccagtttggttttctccctctgcactaggccaagaacttgctgccttgcctgtggggggtcccatccggcttcagagagctctggctggcattgaccatgggggaaagggctggtttcaggctgacatatggccgcaggtccagttcagcccaggtctctcatggttatcttccaacccactgtcacgctgacactatgctgccatgcctgggctgtggacctactgggcatttgaggaactggagaatggagatggcaagagggcaggcttttaagtttgggttggagacaacttcctgtggcccccacaagctgagtctggccttctccagctggccccaaaaaaggcctttgctacatcctgattatctctgaaagtaatcaatcaagtggctccagtagctctggattttctgccagggctgggccattgtggtgctgccccagtatgacatgggaccaaggccagcgcaggttatccacctctgcctggaagtctatactctacccagggcatccctctggtcagaggcagtgagtactgggaactggaggctgacctgtgcttagaagtcctttaatctgggctggtacaggcctcagccttgccctcaatgcacgaaaggtggcccaggagagaggatcaatgccacaggaggcagaagtctggcctctgtgcctctatggagactatcttccagttgctgctcaacagagttgttggctgagacctgcttgggagtctctgctggcccttcatctgttcaggaacacacacacacacacactcacacacgcacacacaatcacaatttgctacagcaacaaaaaagacattgggctgtggcattattaattaaagatgatatccagtctcc

SEQ ID NO: 93 - protein, 1202 aa, Homo sapiens
AAAPFPDRPPAHLVSSRRSAPPGSREPRGTGHLHPPLGVSGSSWCLACVSWMPCGFSPSPVAHHLVPGPPDTPAQQLRCGWTVGGWLLSLVRGLLPCLPPGARTAEGPIMVLAGPLAVSLLLPSLTLLVSHLSSSQDVSSEPSSEQQLCALSKHPTVAFEDLQPWVSNFTYPGARDFSQLALDPSGNQLIVGARNYLFRLSLANVSLLQATEWASSEDTRRSCQSKGKTEEECQNYVRVLIVAGRKVFMCGTNAFSPMCTSRQVGNLSRTTEKINGVARCPYDPRHNSTAVISSQGELYAATVIDFSGRDPAIYRSLGSGPPLRTAQYNSKWLNEPNFVAAYDIGLFAYFFLRENAVEHDCGRTVYSRVARVCKNDVGGRFLLEDTWTTFMKARLNCSRPGEVPFYYNELQSAFHLPEQDLIYGVFTTNVNSIAASAVCAFNLSAISQAFNGPFRYQENPRAAWLPIANPIPNFQCGTLPETGPNENLTERSLQDAQRLFLMSEAVQPVTPEPCVTQDSVRFSHLVVDLVQAKDTLYHVLYIGTESGTILKALSTASRSLHGCYLEELHVLPPGRREPLRSLRILHSARALFVGLRDGVLRVPLERCAAYRSQGACLGARDPYCGWDGKQQRCSTLEDSSNMSLWTQNITACPVRNVTRDGGFGPWSPWQPCEHLDGDNSGSCLCRARSCDSPRPRCGGLDCLGPAIHIANCSRNGAWTPWSSWALCSTSCGIGFQVRQRSCSNPAPRHGGRICVGKSREERFCNENTPCPVPIFWASWGSWSKCSSNCGGGMQSRRRACENGNSCLGCGVEFKTCNPEGCPEVRRNTPWTPWLPVNVTQGGARQEQRFRFTCRAPLADPHGLQFGRRRTETRTCPADGSGSCDTDALVEDLLRSGSTSPHTVSGGWAAWGPWSSCSRDCELGFRVRKRTCTNPEPRNGGLPCVGDAAEYQDCNPQACPVRGAWSCWTSWSPCSASCGGGHYQRTRSCTSPAPSPGEDICLGLHTEEALCATQACPEGWSPWSEWSKCTDDGAQSRSRHCEELLPGSSACAGNSSQSRPCPYSEIPVILPASSMEEATGCAGFNLIHLVATGISCFLGSGLLTLAVYLSCQHCQRQSQESTLVHPATPNHLHYKGGGTPKNEKYTPMEFKTLNKNNLIPDDRANFYPLQQTNVYTTTYYPSPLNKHSFRPEASPGQRCFPNS

SEQ ID NO: 94 - DNA, 1524 bp, Homo sapiens
gcggcagcagcgcgggccccagcagcctcggcagccacagccgctgcagccggggcagcctccgctgctgtcgcctcctctgatgcgcttgccctctcccggccccgggactccgggagaatgtgggtcctaggcatcgcggcaactttttgcggattgttcttgcttccaggctttgcgctgcaaatccagtgctaccagtgtgaagaattccagctgaacaacgactgctcctcccccgagttcattgtgaattgcacggtgaacgttcaagacatgtgtcagaaagaagtgatggagcaaagtgccgggatcatgtaccgcaagtcctgtgcatcatcagcggcctgtctcatcgcctctgccgggtaccagtccttctgctccccagggaaactgaactcagtttgcatcagctgctgcaacacccctctttgtaacgggccaaggcccaagaaaaggggaagttctgcctcggccctcaggccagggctccgcaccaccatcctgttcctcaaattagccctcttctcggcacactgctgaagctgaaggagatgccaccccctcctgcattgttcttccagccctcgcccccaaccccccacctccctgagtgagtttcttctgggtgtccttttattctgggtagggagcgggagtccgtgttctcttttgttcctgtgcaaataatgaaagagctcggtaaagcattctgaataaattcagcctgactgaattttcagtatgtacttgaaggaaggaggtggagtgaaagttcacccccatgtctgtgtaaccggagtcaaggccaggctggcagagtcagtccttagaagtcactgaggtgggcatctgccttttgtaaagcctccagtgtccattccatccctgatgggggcatagtttgagactgcagagtgagagtgacgttttcttagggctggagggccagttcccactcaaggctccctcgcttgacattcaaacttcatgctcctgaaaaccattctctgcagcagaattggctggtttcgcgcctgagttgggctctagtgactcgagactcaatgactgggacttagactggggctcggcctcgctctgaaaagtgcttaagaaaatcttctcagttctccttgcagaggactggcgccgggacgcgaagagcaacgggcgctgcacaaagcgggcgctgtcggtggtggagtgcgcatgtacgcgcaggcgcttctcgtggttggcgtgctgcagcgacaggcggcagcacagcacctgcacgaacacccgccgaaactgctgcgaggacaccgtgtacaggagcgggttgatgaccgagctgaggtagaaaaacgtctccgagaaggggaggaggatcatgtacgcccggaagtaggacctcgtccagtcgtgcttgggtttggccgcagccatgatcctccgaatctggttgggcatccagcatacggccaatgtcacaacaatcagccctgggcagacacgagcaggagggagagacagaga

SEQ ID NO: 95 - protein, 141 aa, Homo sapiens
MWVLGIAATFCGLFLLPGFALQIQCYQCEEFQLNNDCSSPEFIVNCTVNVQDMCQKEVMEQSAGIMYRKSCASSAACLIASAGYQSFCSPGKLNSVCISCCNTPLCNGPRPKKRGSSASALRPGLRTTILFLKLALFSAHC

SEQ ID NO: 96 - DNA, 1329 bp, Homo sapiens
atgcagccgcctccaagtctgtgcggacgcgccctggttgcgctggttcttgcctgcggcctgtcgcggatctggggagaggagagaggcttcccgcctgacagggccactccgcttttgcaaaccgcagagataatgacgccacccactaagaccttatggcccaagggttccaacgccagtctggcgcggtcgttggcacctgcggaggtgcctaaaggagacaggacggcaggatctccgccacgcaccatctcccctcccccgtgccaaggacccatcgagatcaaggagactttcaaatacatcaacacggttgtgtcctgccttgtgttcgtgctggggatcatcgggaactccacacttctgagaattatctacaagaacaagtgcatgcgaaacggtcccaatatcttgatcgccagcttggctctgggagacctgctgcacatcgtcattgacatccctatcaatgtctacaagctgctggcagaggactggccatttggagctgagatgtgtaagctggtgcctttcatacagaaagcctccgtgggaatcactgtgctgagtctatgtgctctgagtattgacagatatcgagctgttgcttcttggagtagaattaaaggaattggggttccaaaatggacagcagtagaaattgttttgatttgggtggtctctgtggttctggctgtccctgaagccataggttttgatataattacgatggactacaaaggaagttatctgcgaatctgcttgcttcatcccgttcagaagacagctttcatgcagttttacaagacagcaaaagattggtggctattcagtttctatttctgcttgccattggccatcactgcatttttttatacactaatgacctgtgaaatgttgagaaagaaaagtggcatgcagattgctttaaatgatcacctaaagcagagacgggaagtggccaaaaccgtcttttgcctggtccttgtctttgccctctgctggcttccccttcacctcagcaggattctgaagctcactctttataatcagaatgatcccaatagatgtgaacttttgagctttctgttggtattggactatattggtatcaacatggcttcactgaattcctgcattaacccaattgctctgtatttggtgagcaaaagattcaaaaactgctttaagtcatgcttatgctgctggtgccagtcatttgaagaaaaacagtccttggaggaaaagcagtcgtgcttaaagttcaaagctaatgatcacggatatgacaacttccgttccagtaataaatacagctcatcttga

SEQ ID NO: 97 - protein, 442 aa, Homo sapiens
MQPPPSLCGRALVALVLACGLSRIWGEERGFPPDRATPLLQTAEIMTPPTKTLWPKGSNASLARSLAPAEVPKGDRTAGSPPRTISPPPCQGPIEIKETFKYINTVVSCLVFVLGIIGNSTLLRIIYKNKCMRNGPNILIASLALGDLLHIVIDIPINVYKLLAEDWPFGAEMCKLVPFIQKASVGITVLSLCALSIDRYRAVASWSRIKGIGVPKWTAVEIVLIWVVSVVLAVPEAIGFDIITMDYKGSYLRICLLHPVQKTAFMQFYKTAKDWWLFSFYFCLPLAITAFFYTLMTCEMLRKKSGMQIALNDHLKQRREVAKTVFCLVLVFALCWLPLHLSRILKLTLYNQNDPNRCELLSFLLVLDYIGINMASLNSCINPIALYLVSKRFKNCFKSCLCCWCQSFEEKQSLEEKQSCLKFKANDHGYDNFRSSNKYSSS

SEQ ID NO: 98 - DNA, 4573 bp, Homo sapiens
agaacaccaattacaaaccacaggcttcctgctctagggagttgatccagaattgtctttctgaaaggaagcactcggaatccttccgaactttccaagtccatccatgattcagagatactgccttctctctctctgggattttatgtgtttctgatagtgaattgttgatgtatttgctactttgcttcttttctctttcaagacttgatcattttatatgctgtttggagaaaaaaagaacttttgttagcaaggaggtttcagaaatgattttggattttctgtaagtgtttaatttagttctaggggacagcatctctcatcccggagtaaatttctgcctttgacctgcatggattattttttcaggctgcggaatttctcggcacctacctgtagtatggggcacttggtttggttgcagagtaagaaggtggaagaatgagctgtacttggttaagcagttgaaaccttttttgagcaggatctgtaaaagcataattgaatttgtttcacccccgtggattccagtgggcccgacagcgcaacagtgcctggcaacttgatgcatatggaagagcaatgccaagtgatctgacataatacaaattcacgaagtgacattcaatcacaagcaaagttggaaattccaaagagaagtggtgagatctttactagtcacagtgaagatgggagaaaatgacatacctgcagcagatgtgggctgaaaatatcctcttctctgcccaatcaggaatgctacctgtttttgggaataaactttagagaaaggaagggccaaaactacgacttggctttctgaaacggaagcataaatgttcttttcctccatttgtctggatctgagaacctgcatttggtattagctagtggaagcagtatgtatggttgaagtgcattgctgcagctggtagcatgagtggtggccaccagctgcagctggctgccctctggccctggctgctgatggctaccctgcaggcaggctttggacgcacaggactggtactggcagcagcggtggagtctgaaagatcagcagaacagaaagctattatcagagtgatccccttgaaaatggaccccacaggaaaactgaatctcactttggaaggtgtgtttgctggtgttgctgaaataactccagcagaaggaaaattaatgcagtcccacccgctgtacctgtgcaatgccagtgatgacgacaatctggagcctggattcatcagcatcgtcaagctggagagtcctcgacgggccccccgcccctgcctgtcactggctagcaaggctcggatggcgggtgagcgaggagccagtgctgtcctctttgacatcactgaggatcgagctgctgctgagcagctgcagcagccgctggggctgacctggccagtggtgttgatctggggtaatgacgctgagaagctgatggagtttgtgtacaagaaccaaaaggcccatgtgaggattgagctgaaggagcccccggcctggccagattatgatgtgtggatcctaatgacagtggtgggcaccatctttgtgatcatcctggcttcggtgctgcgcatccggtgccgcccccgccacagcaggccggatccgcttcagcagagaacagcctgggccatcagccagctggccaccaggaggtaccaggccagctgcaggcaggcccggggtgagtggccagactcagggagcagctgcagctcagcccctgtgtgtgccatctgtctggaggagttctctgaggggcaggagctacgggtcatttcctgcctccatgagttccatcgtaactgtgtggacccctggttacatcagcatcggacttgccccctctgcatgttcaacatcacagagggagattcattttcccagtccctgggaccctctcgatcttaccaagaaccaggtcgaagactccacctcattcgccagcatcccggccatgcccactaccacctccctgctgcctacctgttgggcccttcccggagtgcagtggctcggcccccacgacctggtcccttcctgccatcccaggagccaggcatgggccctcggcatcaccgcttccccagagctgcacatccccgggctccaggagagcagcagcgcctggcaggagcccagcacccctatgcacaaggctggggactgagccacctccaatccacctcacagcaccctgctgcttgcccagtgcccctacgccgggccaggccccctgacagcagtggatctggagaaagctattgcacagaacgcagtgggtacctggcagatgggccagccagtgactccagctcagggccctgtcatggctcttccagtgactctgtggtcaactgcacggacatcagcctacagggggtccatggcagcagttctactttctgcagctccctaagcagtgactttgaccccctagtgtactgcagccctaaaggggatccccagcgagtggacatgcagcctagtgtgacctctcggcctcgttccttggactcggtggtgcccacaggggaaacccaggtttccagccatgtccactaccaccgccaccggcaccaccactacaaaaagcggttccagtggcatggcaggaagcctggcccagaaaccggagtcccccagtccaggcctcctattcctcggacacagccccagccagagccaccttctcctgatcagcaagtcaccagatccaactcagcagccccttcggggcggctctctaacccacagtgccccagggccctccctgagccagcccctggcccagttgacgcctccagcatctgccccagtaccagcagtctgttcaacttgcaaaaatccagcctctctgcccgacacccacagaggaaaaggcgggggggtccctccgagcccacccctggctctcggccccaggatgcaactgtgcacccagcttgccagatttttccccattacacccccagtgtggcatatccttggtccccagaggcacaccccttgatctgtggacctccaggcctggacaagaggctgctaccagaaaccccaggcccctgttactcaaattcacagccagtgtggttgtgcctgactcctcgccagcccctggaaccacatccacctggggaggggccttctgaatggagttctgacaccgcagagggcaggccatgcccttatccgcactgccaggtgctgtcggcccagcctggctcagaggaggaactcgaggagctgtgtgaacaggctgtgtgagatgttcaggcctagctccaaccaagagtgtgctccagatgtgtttgggccctacctggcacagagtcctgctcctgggaaaggaaaggaccacagcaaacaccattctttttgccgtacttcctagaagcactggaagaggactggtgatggtggagggtgagagggtgccgtttcctgctccagctccagaccttgtctgcagaaaacatctgcagtgcagcaaatccatgtccagccaggcaaccagctgctgcctgtggcgtgtgtgggctggatcccttgaaggctgagtttttgagggcagaaagctagctatgggtagccaggtgttacaaaggtgctgctccttctccaacccctacttggtttccctcaccccaagcctcatgttcataccagccagtgggttcagcagaacgcatgacaccttatcacctccctccttgggtgagctctgaacaccagctttggcccctccacagtaaggctgctacatcaggggcaaccctggctctatcattttccttttttgccaaaaggaccagtagcataggtgagccctgagcactaaaaggaggggtccctgaagctttcccactatagtgtggagttctgtccctgaggtgggtacagcagccttggttcctctgggggttgagaataagaatagtggggagggaaaaactcctccttgaagatttcctgtctcagagtcccagagaggtagaaaggaggaatttctgctggactttatctgggcagaggaaggatggaatgaaggtagaaaaggcagaattacagctgagcggggacaacaaagagttcttctctgggaaaagttttgtcttagagcaaggatggaaaatggggacaacaaaggaaaagcaaagtgtgacccttgggtttggacagcccagaggcccagctccccagtataagccatacaggccagggacccacaggagagtggattagagcacaagtctggcctcactgagtggacaagagctgatgggcctcatcagggtgacattcaccccagggcagcctgaccactcttggcccctcaggcattatcccatttggaatgtgaatgtggtggcaaagtgggcagaggaccccacctgggaacctttttccctcagttagtggggagactagcacctaggtacccacatgggtatttatatctgaaccagacagacgcttgaatcaggcactatgttaagaaatatatttatttgctaatatatttatccacaaaaaaaaaaaaaaaaaa

SEQ ID NO: 99 - protein, 783 aa, Homo sapiens
MSGGHQLQLAALWPWLLMATLQAGFGRTGLVLAAAVESERSAEQKAIIRVIPLKMDPTGKLNLTLEGVFAGVAEITPAEGKLMQSHPLYLCNASDDDNLEPGFISIVKLESPRRAPRPCLSLASKARMAGERGASAVLFDITEDRAAAEQLQQPLGLTWPVVLIWGNDAEKLMEFVYKNQKAHVRIELKEPPAWPDYDVWILMTVVGTIFVIILASVLRIRCRPRHSRPDPLQQRTAWAISQLATRRYQASCRQARGEWPDSGSSCSSAPVCAICLEEFSEGQELRVISCLHEFHRNCVDPWLHQHRTCPLCMFNITEGDSFSQSLGPSRSYQEPGRRLHLIRQHPGHAHYHLPAAYLLGPSRSAVARPPRPGPFLPSQEPGMGPRHHRFPRAAHPRAPGEQQRLAGAQHPYAQGWGLSHLQSTSQHPAACPVPLRRARPPDSSGSGESYCTERSGYLADGPASDSSSGPCHGSSSDSVVNCTDISLQGVHGSSSTFCSSLSSDFDPLVYCSPKGDPQRVDMQPSVTSRPRSLDSVVPTGETQVSSHVHYHRHRHHHYKKRFQWHGRKPGPETGVPQSRPPIPRTQPQPEPPSPDQQVTRSNSAAPSGRLSNPQCPRALPEPAPGPVDASSICPSTSSLFNLQKSSLSARHPQRKRRGGPSEPTPGSRPQDATVHPACQIFPHYTPSVAYPWSPEAHPLICGPPGLDKRLLPETPGPCYSNSQPVWLCLTPRQPLEPHPPGEGPSEWSSDTAEGRPCPYPHCQVLSAQPGSEEELEELCEQAV

SEQ ID NO: 100 - DNA, 6857 bp, Homo sapiens
gccccctccgagctccccgactcctccccgcgctccacggctcttcccgactccagtcagcgttcctcgggccctcggcgccacaagctgtccgggcacgcagcccctagcggcgcgtcgctgccaagccggcctccgcgcgcctccctccttccttctcccctggctgttcgcgatccagcttgggtaggcggggaagcagctggagtgcgaccgccacggcagccaccctgcaaccgccagtcggaggtgcagtccgtaggccctggcccccgggtgggcccttggggagtcggcgccgctcccgaggagctgcaaggctcgcccctgcccggcgtggagggcgcggggggcgcggaggatattcttggtgatcttggaagtgtccgtatcatggaatcaatctctatgatgggaagccctaagagccttagtgaaactgttttacctaatggcataaatggtatcaaagatgcaaggaaggtcactgtaggtgtgattggaagtggagattttgccaaatccttgaccattcgacttattagatgcggctatcatgtggtcataggaagtagaaatcctaagtttgcttctgaattttttcctcatgtggtagatgtcactcatcatgaagatgctctcacaaaaacaaatataatatttgttgctatacacagagaacattatacctccctgtgggacctgagacatctgcttgtgggtaaaatcctgattgatgtgagcaataacatgaggataaaccagtacccagaatccaatgctgaatatttggcttcattattcccagattctttgattgtcaaaggatttaatgttgtctcagcttgggcacttcagttaggacctaaggatgccagccggcaggtttatatatgcagcaacaatattcaagcgcgacaacaggttattgaacttgcccgccagttgaatttcattcccattgacttgggatccttatcatcagccagagagattgaaaatttacccctacgactctttactctctggagagggccagtggtggtagctataagcttggccacattttttttcctttattcctttgtcagagatgtgattcatccatatgctagaaaccaacagagtgacttttacaaaattcctatagagattgtgaataaaaccttacctatagttgccattactttgctctccctagtataccttgcaggtcttctggcagctgcttatcaactttattacggcaccaagtataggagatttccaccttggttggaaacctggttacagtgtagaaaacagcttggattactaagttttttcttcgctatggtccatgttgcctacagcctctgcttaccgatgagaaggtcagagagatatttgtttctcaacatggcttatcagcaggttcatgcaaatattgaaaactcttggaatgaggaagaagtttggagaattgaaatgtatatctcctttggcataatgagccttggcttactttccctcctggcagtcacttctatcccttcagtgagcaatgctttaaactggagagaattcagttttattcagtctacacttggatatgtcgctctgctcataagtactttccatgttttaatttatggatggaaacgagcttttgaggaagagtactacagattttatacaccaccaaactttgttcttgctcttgttttgccctcaattgtaattctgggtaagattattttattccttccatgtataagccaaaagctaaaacgaattaaaaaaggctgggaaaagagccaatttctggaagaaggtattggaggaacaattcctcatgtctccccggagagggtcacagtaatgtgatgataaatggtgttcacagctgccatataaagttctactcatgccattatttttatgacttctacgttcagttacaagtatgctgtcaaattatcgtgggttgaaacttgttaaatgagatttcaactgacttagtgatagagttttcttcaagttaattttcacaaatgtcatgtttgccaatatgaatttttctagtcaacatattattgtaatttaggtatgttttgttttgttttgcacaactgtaaccctgttgttactttatatttcataatcaggcaaaaatacttacagttaataatatagatataatgttaaaaacaatttgcaaaccagcagaattttaagcttttaaaataattcaatggatatacatttttttctgaagattaagattttaattattcaacttaaaaagtagaaatgcattattatacatttttttaagaaaggacacgttatgttagcatctaggtaaggctgcatgatagcattcctatatttctctcataaaataggatttgaaggatgaaattaattgtatgaagcaatgtgattatatgaagagacacaaattaaaaagacaaattaaacctgaaattatatttaaaatatatttgagacatgaaatacatactgataatacatacctcatgaaagattttattctttattgtgttacagagcagtttcattttcatattaatatactgatcaggaagaggattcagtaacatttggcctccaaaactgctatctctaatacggtaccaatcctaggaactgtatactagttcctacttagaacaaaagtatcaagtttgcacacaagtaatctgccagctgacctttgtcgcaccttaaccagtcaccacttgctatggtataggattatactgatgttctttgagggattctgatgtgctaggcatggttctaagtactttacttgtattatcccatttaatacttagaacaaccccgtgagataagtagttattatcctcattttacacatgagggaccgaaggatagaaaagttatttttcaaaggtcatgcagttaataaatggcagagtgagcattcaagtccaggtagtcatattccagaggccacggttttaaccactaggctctagagctcccgccgcgcccctatgcattatgttcacaatgccaatctagatgcttcctcttttgtataaagtcactgacattctttagagtgggttgggtgcatccaaaaatgtataaaaatattattataataaacttattactgcttgtagggtaattcacagttacttaccctattcttgcttggaacatgagcctggagacccatggcagtccatatgcctccctatgcagtgaagggccctagcagtgttaacaaattgctgagatcccacggagtctttcaaaaatctctgtagagttagtcttctccttttctcttcctgagaagttctcctgcctgcataaccattcattagggagtactttacaagcatgaaggatattagggtaagtggctaattataaatctactctagagacatataatcatacagattattcataaaatttttcagtgctgtccttccacatttaattgcattttgctcaaactgtagaatgccctacattccccccaccccaatttgctatttccttattaaaatagaaaattataggcaagatacaattatatgcgttcctcttcctgaaattataacatttctaaacttacccacgtaggtactactgaatccaactgccaacaataaaaagacttttatttagtagaggctacctttcccaccagtgactctttttctacaactgccttgtcagtttggtaattcacttatgattttctaatgttctcttggtgaattttattatcttgtaccctctttttttttttttttttttttaaagacagagtcttgctctgtcacccaggctggagtgcagtggcacgatctcggctcactgcaagctctgcctcccgggttcacgccattctcctgcctcagcctcccgagtagctgggactacaggtgcccgccaccatgcccggctgatttctttttgtatttttagtagagacggagtttcaccgtgttagccaggatggtctcgatctcctgacctcgtgatccgcccgccttggcctccaaagtgctgggattacaggtgtgagctaccgcgcccggcctattatcttgtactttctaactgagccctctattttctttattttaataatatttctccctacttgagaatcacttgttagttcttggtaggaattcagttgggcaatgataacttttatgggcaaaaacattctattatagtgaacaaatgaaaataacagcgtattttcaatattttcttattccttaaattccactcttttaacactatgcttaaccacttaatgtgatgaaatattcctaaaagttaaatgactattaaagcatatattgttgcatgtatatattaagtagccgatactctaaataaaaataccactgttacagataaatggggcctttaaaaatatgaaaaacaaacttgtgaaaatgtataaaagatgcatctgttgtttcaaatggcactatcttcttttcagtactacaaaaacagaataattttgaagttttagaataaatgtaatatatttactataattctaaatgtttaaatgcttttctaaaaatgcaaaactatgatgtttagttgctttattttacctctatgtgattatttttcttaattgttattttttataatcattatttttctgaaccattcttctggcctcagaagtaggactgaattctactattgctaggtgtgagaaagtggtggtgagaaccttagagcagtggagatttgctacctggtctgtgttttgagaagtgccccttagaaagttaaaagaatgtagaaaagatactcagtcttaatcctatgcaaaaaaaaaaatcaagtaattgttttcctatgaggaaaataaccatgagctgtatcatgctacttagcttttatgtaaatatttcttatgtctcctctattaagagtatttaaaatcatatttaaatatgaatctattcatgctaacattatttttcaaaacatacatggaaatttagcccagattgtctacatataaggtttttatttgaattgtaaaatatttaaaagtatgaataaaatatatttataggtatttatcagagatgattattttgtgctacatacaggttggctaatgagctctagtgttaaactacctgattaatttcttataaagcagcataaccttggcttgattaaggaattctactttcaaaaattaatctgataatagtaacaaggtatattatactttcattacaatcaaattatagaaattacttgtgtaaaagggcttcaagaatatatccaatttttaaatattttaatatatctcctatctgataacttaattcttctaaattaccacttgccattaagctatttcataataaattctgtacagtttccccccaaaaaagagatttatttatgaaatatttaaagtttctaatgtggtattttaaataaagtatcataaatgtaataagtaaatatttatttaggaatactgtgaacactgaactaattattcctgtgtcagtctatgaaatccctgttttgaaatacgtaaacagcctaaaatgtgttgaaattattttgtaaatccatgacttaaaacaagatacatacatagtataacacacctcacagtgttaagatttatattgtgaaatgagacaccctaccttcaattgttcatcagtgggtaaaacaaattctgatgtacattcaggacaaatgattagccctaaatgaaactgtaataatttcagtggaaactcaatctgtttttacctttaaacagtgaattttacatgaatgaatgggttcttcactttttttttagtatgagaaaattatacagtgcttaattttcagagattctttccatatgttactaaaaaatgttttgttcagcctaacatactgagttttttttaactttctaaattattgaatttccatcatgcattcatccaaaattaaggcagactgtttggattcttccagtggccagatgagctaaattaaatcacaaaagcagatgcttttgtatgatctccaaattgccaactttaaggaaatattctcttgaaattgtctttaaagatcttttgcagctttgcagatacccagactgagctggaactggaatttgtcttcctattgactctacttctttaaaagcggctgcccattacattcctcagctgtccttgcagttaggtgtacatgtgactgagtgttggccagtgagatgaagtctcctcaaaggaaggcagcatgtgtcctttttcatcccttcatcttgctgctgggattgtggatataacaggagccctggcagctgtctccagaggatcaaagccacacccaaagagtaaggcagattagagaccagaaagaccttgactacttccctacttccactgctttttcctgcatttaagccattgtaaatctgggtgtgttacatgaagtgaaaattaattctttctgcccttcagttctttatcctgataccatttaacactgtctgaattaactagactgcaataattctttcttttgaaagcttttaaaggataatgtgcaattcacattaaaattgattttccattgtcaattagttatactcattttcctgccttgatctttcattagatattttgtatctgcttggaatatattatcttctttttaactgtgtaattggtaattactaaaactctgtaatctccaaaatattgctatcaaattacacaccatgttttctatcattctcatagatctgccttataaacatttaaataaaaagtactatttaatgattt

SEQ ID NO: 101 - protein, 490 aa, Homo sapiens
MESISMMGSPKSLSETVLPNGINGIKDARKVTVGVIGSGDFAKSLTIRLIRCGYHVVIGSRNPKFASEFFPHVVDVTHHEDALTKTNIIFVAIHREHYTSLWDLRHLLVGKILIDVSNNMRINQYPESNAEYLASLFPDSLIVKGFNVVSAWALQLGPKDASRQVYICSNNIQARQQVIELARQLNFIPIDLGSLSSAREIENLPLRLFTLWRGPVVVAISLATFFFLYSFVRDVIHPYARNQQSDFYKIPIEIVNKTLPIVAITLLSLVYLAGLLAAAYQLYYGTKYRRFPPWLETWLQCRKQLGLLSFFFAMVHVAYSLCLPMRRSERYLFLNMAYQQVHANIENSWNEEEVWRIEMYISFGIMSLGLLSLLAVTSIPSVSNALNWREFSFIQSTLGYVALLISTFHVLIYGWKRAFEEEYYRFYTPPNFVLALVLPSIVILGKIILFLPCISQKLKRIKKGWEKSQFLEEGIGGTIPHVSPERVTVM

SEQ ID NO: 102 - DNA, 4103 bp, Homo sapiens
aggctggaaagtggaggatccggtttgctctgggcgggtctggaagcagagccggcggagggagcgccggggccctgggctgcaggaggttgcggcggccgcggcagcatggtggtgccggagaaggagcagagctggatccccaagatcttcaagaagaagacctgcacgacgttcatagttgactccacagatccgggagggaccttgtgccagtgtgggcgcccccggaccgcccaccccgcagtggccatggaggatgccttcggggcagccgtggtgaccgtgtgggacagcgatgcacacaccacggagaagcccaccgatgcctacggagagctggacttcacgggggccggccgcaagcacagcaatttcctccggctctctgaccgaacggatccagctgcagtttatagtctggtcacacgcacatggggcttccgtgccccgaacctggtggtgtcagtgctggggggatcggggggccccgtcctccagacctggctgcaggacctgctgcgtcgtgggctggtgcgggctgcccagagcacaggagcctggattgtcactgggggtctgcacacgggcatcggccggcatgttggtgtggctgtacgggaccatcagatggccagcactgggggcaccaaggtggtggccatgggtgtggccccctggggtgtggtccggaatagagacaccctcatcaaccccaagggctcgttccctgcgaggtaccggtggcgcggtgacccggaggacggggtccagtttcccctggactacaactactcggccttcttcctggtggacgacggcacacacggctgcctggggggcgagaaccgcttccgcttgcgcctggagtcctacatctcacagcagaagacgggcgtgggagggactggaattgacatccctgtcctgctcctcctgattgatggtgatgagaagatgttgacgcgaatagagaacgccacccaggctcagctcccatgtctcctcgtggctggctcagggggagctgcggactgcctggcggagaccctggaagacactctggccccagggagtgggggagccaggcaaggcgaagcccgagatcgaatcaggcgtttctttcccaaaggggaccttgaggtcctgcaggcccaggtggagaggattatgacccggaaggagctcctgacagtctattcttctgaggatgggtctgaggaattcgagaccatagttttgaaggcccttgtgaaggcctgtgggagctcggaggcctcagcctacctggatgagctgcgtttggctgtggcttggaaccgcgtggacattgcccagagtgaactctttcggggggacatccaatggcggtccttccatctcgaagcttccctcatggacgccctgctgaatgaccggcctgagttcgtgcgcttgctcatttcccacggcctcagcctgggccacttcctgaccccgatgcgcctggcccaactctacagcgcggcgccctccaactcgctcatccgcaaccttttggaccaggcgtcccacagcgcaggcaccaaagccccagccctaaaagggggagctgcggagctccggccccctgacgtggggcatgtgctgaggatgctgctggggaagatgtgcgcgccgaggtacccctccgggggcgcctgggaccctcacccaggccagggcttcggggagagcatgtatctgctctcggacaaggccacctcgccgctctcgctggatgctggcctcgggcaggccccctggagcgacctgcttctttgggcactgttgctgaacagggcacagatggccatgtacttctgggagatgggttccaatgcagtttcctcagctcttggggcctgtttgctgctccgggtgatggcacgcctggagcctgacgctgaggaggcagcacggaggaaagacctggcgttcaagtttgaggggatgggcgttgacctctttggcgagtgctatcgcagcagtgaggtgagggctgcccgcctcctcctccgtcgctgcccgctctggggggatgccacttgcctccagctggccatgcaagctgacgcccgtgccttctttgcccaggatggggtacagtctctgctgacacagaagtggtggggagatatggccagcactacacccatctgggccctggttctcgccttcttttgccctccactcatctacacccgcctcatcaccttcaggaaatcagaagaggagcccacacgggaggagctagagtttgacatggatagtgtcattaatggggaagggcctgtcgggacggcggacccagccgagaagacgccgctgggggtcccgcgccagtcgggccgtccgggttgctgcgggggccgctgcggggggcgccggtgcctacgccgctggttccacttctggggcgcgccggtgaccatcttcatgggcaacgtggtcagctacctgctgttcctgctgcttttctcgcgggtgctgctcgtggatttccagccggcgccgcccggctccctggagctgctgctctatttctgggctttcacgctgctgtgcgaggaactgcgccagggcctgagcggaggcgggggcagcctcgccagcgggggccccgggcctggccatgcctcactgagccagcgcctgcgcctctacctcgccgacagctggaaccagtgcgacctagtggctctcacctgcttcctcctgggcgtgggctgccggctgaccccgggtttgtaccacctgggccgcactgtcctctgcatcgacttcatggttttcacggtgcggctgcttcacatcttcacggtcaacaaacagctggggcccaagatcgtcatcgtgagcaagatgatgaaggacgtgttcttcttcctcttcttcctcggcgtgtggctggtagcctatggcgtggccacggaggggctcctgaggccacgggacagtgacttcccaagtatcctgcgccgcgtcttctaccgtccctacctgcagatcttcgggcagattccccaggaggacatggacgtggccctcatggagcacagcaactgctcgtcggagcccggcttctgggcacaccctcctggggcccaggcgggcacctgcgtctcccagtatgccaactggctggtggtgctgctcctcgtcatcttcctgctcgtggccaacatcctgctggtcaacttgctcattgccatgttcagttacacattcggcaaagtacagggcaacagcgatctctactggaaggcgcagcgttaccgcctcatccgggaattccactctcggcccgcgctggccccgccctttatcgtcatctcccacttgcgcctcctgctcaggcaattgtgcaggcgaccccggagcccccagccgtcctccccggccctcgagcatttccgggtttacctttctaaggaagccgagcggaagctgctaacgtgggaatcggtgcataaggagaactttctgctggcacgcgctagggacaagcgggagagcgactccgagcgtctgaagcgcacgtcccagaaggtggacttggcactgaaacagctgggacacatccgcgagtacgaacagcgcctgaaagtgctggagcgggaggtccagcagtgtagccgcgtcctggggtgggtggccgaggccctgagccgctctgccttgctgcccccaggtgggccgccaccccctgacctgcctgggtccaaagactgagccctgctggcggacttcaaggagaagcccccacaggggattttgctcctagagtaaggctcatctgggcctcggcccccgcacctggtggccttgtccttgaggtgagccccatgtccatctgggccactgtcaggaccacctttgggagtgtcatccttacaaaccacagcatgcccggctcctcccagaaccagtcccagcctgggaggatcaaggcctggatcccgggccgttatccatctggaggctgcagggtccttggggtaacagggaccacagacccctcaccactcacagattcctcacactggggaaataaagccatttcagaggaatcgtgaaaaaaa

SEQ ID NO: 103 - protein, 1214 aa, Homo sapiens
MVVPEKEQSWIPKIFKKKTCTTFIVDSTDPGGTLCQCGRPRTAHPAVAMEDAFGAAVVTVWDSDAHTTEKPTDAYGELDFTGAGRKHSNFLRLSDRTDPAAVYSLVTRTWGFRAPNLVVSVLGGSGGPVLQTWLQDLLRRGLVRAAQSTGAWIVTGGLHTGIGRHVGVAVRDHQMASTGGTKVVAMGVAPWGVVRNRDTLINPKGSFPARYRWRGDPEDGVQFPLDYNYSAFFLVDDGTHGCLGGENRFRLRLESYISQQKTGVGGTGIDIPVLLLLIDGDEKMLTRIENATQAQLPCLLVAGSGGAADCLAETLEDTLAPGSGGARQGEARDRIRRFFPKGDLEVLQAQVERIMTRKELLTVYSSEDGSEEFETIVLKALVKACGSSEASAYLDELRLAVAWNRVDIAQSELFRGDIQWRSFHLEASLMDALLNDRPEFVRLLISHGLSLGHFLTPMRLAQLYSAAPSNSLIRNLLDQASHSAGTKAPALKGGAAELRPPDVGHVLRMLLGKMCAPRYPSGGAWDPHPGQGFGESMYLLSDKATSPLSLDAGLGQAPWSDLLLWALLLNRAQMAMYFWEMGSNAVSSALGACLLLRVMARLEPDAEEAARRKDLAFKFEGMGVDLFGECYRSSEVRAARLLLRRCPLWGDATCLQLAMQADARAFFAQDGVQSLLTQKWWGDMASTTPIWALVLAFFCPPLIYTRLITFRKSEEEPTREELEFDMDSVINGEGPVGTADPAEKTPLGVPRQSGRPGCCGGRCGGRRCLRRWFHFWGAPVTIFMGNVVSYLLFLLLFSRVLLVDFQPAPPGSLELLLYFWAFTLLCEELRQGLSGGGGSLASGGPGPGHASLSQRLRLYLADSWNQCDLVALTCFLLGVGCRLTPGLYHLGRTVLCIDFMVFTVRLLHIFTVNKQLGPKIVIVSKMMKDVFFFLFFLGVWLVAYGVATEGLLRPRDSDFPSILRRVFYRPYLQIFGQIPQEDMDVALMEHSNCSSEPGFWAHPPGAQAGTCVSQYANWLVVLLLVIFLLVANILLVNLLIAMFSYTFGKVQGNSDLYWKAQRYRLIREFHSRPALAPPFIVISHLRLLLRQLCRRPRSPQPSSPALEHFRVYLSKEAERKLLTWESVHKENFLLARARDKRESDSERLKRTSQKVDLALKQLGHIREYEQRLKVLEREVQQCSRVLGWVAEALSRSALLPPGGPPPPDLPGSKD

SEQ ID NO: 104 - DNA, 2174 bp, Homo sapiens
aatgatagagatattagggctagttaaccacagttttacaagactcctcttcccgcgtgtgggccattgtcatgctggtgggcgtcccgcccacctgaaaggtctccccgccccgactggggtttgttgttgaagaaggagaatccccggaaaggctgagtctccagctcaaggtcaaaacgtccaaggccgaaagccctccagtttcccctggacgccttgctcctgcttctgctacgaccttctggggaaaacgaatttctcattttcttcttaaattgccattttcgctttaggagatgaatgttttcctttggctgttttggcaatgactctgaattaaagcgatgctaacgcctcttttccccctaattgttaaaagctatggactgcaggaagatggcccgcttctcttacagtgtgatttggatcatggccatttctaaagtctttgaactgggattagttgccgggctgggccatcaggaatttgctcgtccatctcggggatacctggccttcagagatgacagcatttggccccaggaggagcctgcaattcggcctcggtcttcccagcgtgtgccgcccatggggatacagcacagtaaggagctaaacagaacctgctgcctgaatgggggaacctgcatgctggggtccttttgtgcctgccctccctccttctacggacggaactgtgagcacgatgtgcgcaaagagaactgtgggtctgtgccccatgacacctggctgcccaagaagtgttccctgtgtaaatgctggcacggtcagctccgctgctttcctcaggcatttctacccggctgtgatggccttgtgatggatgagcacctcgtggcttccaggactccagaactaccaccgtctgcacgtactaccacttttatgctagttggcatctgcctttctatacaaagctactattaatcgacattgacctatttccagaaatacaattttagatatcatgcaaatttcatgaccagtaaaggctgctgctacaatgtcctaactgaaagatgatcatttgtagttgccttaaaataatgaatacatttccaaaatggtctctaacatttccttacagaactacttcttacttctttgccctgccctctcccaaaaaactacttcttttttcaaaagaaagtcagccatatctccattgtgcctaagtccagtgtttctttttttttttttttttgagacggagtctcactctgtcacccaggctggactgcaatgacgcgatcttggttcactgcaacctccgcatccggggttcaagccattctcctgcctcagcctcccaagtaactgggattacaggcatgtgtcaccatgcccagctaatttttttgtatttttagtagagatgggggtttcaccatattggccagtctggtctcgaactcctgaccttgtgatccactcgcctcagcctctcgaagtgctgagattacacacgtgagcaactgtgcaaggcctggtgtttcttgatacatgtaattctaccaaggtcttcttaatatgttcttttaaatgattgaattatatgttcagattattggagactaattctaatgtggaccttagaatacagttttgagtagagttgatcaaaatcaattaaaatagtctctttaaaaggaaagaaaacatctttaaggggaggaaccagagtgctgaaggaatggaagtccatctgcgtgtgtgcagggagactgggtaggaaagaggaagcaaatagaagagagaggttgaaaaacaaaatgggttacttgattggtgattaggtggtggtagagaagcaagtaaaaaggctaaatggaagggcaagtttccatcatctatagaaagctatataagacaagaactcccctttttttcccaaaggcattataaaaagaatgaagcctccttagaaaaaaaattatacctcaatgtccccaacaagattgcttaataaattgtgtttcctccaagctattcaattcttttaactgttgtagaagacaaaatgttcacaatatatttagttgtaaaccaagtgatcaaactacatattgtaaagcccatttttaaaatacattgtatatatgtgtatgcacagtaaaaatggaaactatattgacctaaaaaaaaaaaaa

SEQ ID NO: 105 - protein, 188 aa, Homo sapiens
MDCRKMARFSYSVIWIMAISKVFELGLVAGLGHQEFARPSRGYLAFRDDSIWPQEEPAIRPRSSQRVPPMGIQHSKELNRTCCLNGGTCMLGSFCACPPSFYGRNCEHDVRKENCGSVPHDTWLPKKCSLCKCWHGQLRCFPQAFLPGCDGLVMDEHLVASRTPELPPSARTTTFMLVGICLSIQSYY

SEQ ID NO: 106 - DNA, 3934 bp, Homo sapiens
gccctcccagagctgccggacgctcgcgggtctcggaacgcatcccgccgcgggggcttcggccgtggcatgggcgccgcgggcctgctcggggttttcttggctctcgtcgcaccgggggtcctcgggatttcttgtggctctcctccgcctatcctaaatggccggattagttattattctacccccattgctgttggtaccgtgataaggtacagttgttcaggtaccttccgcctcattggagaaaaaagtctattatgcataactaaagacaaagtggatggaacctgggataaacctgctcctaaatgtgaatatttcaataaatattcttcttgccctgagcccatagtaccaggaggatacaaaattagaggctctacaccctacagacatggtgattctgtgacatttgcctgtaaaaccaacttctccatgaacggaaacaagtctgtttggtgtcaagcaaataatatgtgggggccgacacgactaccaacctgtgtaagtgttttccctctcgagtgtccagcacttcctatgatccacaatggacatcacacaagtgagaatgttggctccattgctccaggattgtctgtgacttacagctgtgaatctggttacttgcttgttggagaaaagatcattaactgtttgtcttcgggaaaatggagtgctgtcccccccacatgtgaagaggcacgctgtaaatctctaggacgatttcccaatgggaaggtaaaggagcctccaattctccgggttggtgtaactgcaaactttttctgtgatgaagggtatcgactgcaaggcccaccttctagtcggtgtgtaattgctggacagggagttgcttggaccaaaatgccagtatgtgaagaaattttttgcccatcacctccccctattctcaatggaagacatataggcaactcactagcaaatgtctcatatggaagcatagtcacttacacttgtgacccggacccagaggaaggagtgaacttcatccttattggagagagcactctccgttgtacagttgatagtcagaagactgggacctggagtggccctgccccacgctgtgaactttctacttctgcggttcagtgtccacatccccagatcctaagaggccgaatggtatctgggcagaaagatcgatatacctataacgacactgtgatatttgcttgcatgtttggcttcaccttgaagggcagcaagcaaatccgatgcaatgcccaaggcacatgggagccatctgcaccagtctgtgaaaaggaatgccaggcccctcctaacatcctcaatgggcaaaaggaagatagacacatggtccgctttgaccctggaacatctataaaatatagctgtaaccctggctatgtgctggtgggagaagaatccatacagtgtacctctgagggggtgtggacaccccctgtaccccaatgcaaagtggcagcgtgtgaagctacaggaaggcaactcttgacaaaaccccagcaccaatttgttagaccagatgtcaactcttcttgtggtgaagggtacaagttaagtgggagtgtttatcaggagtgtcaaggcacaattccttggtttatggagattcgtctttgtaaagaaatcacctgcccaccaccccctgttatctacaatggggcacacaccgggagttccttagaagattttccatatggaaccacggtcacttacacatgtaaccctgggccagaaagaggagtggaattcagcctcattggagagagcaccatccgttgtacaagcaatgatcaagaaagaggcacctggagtggccctgctcccctatgtaaactttccctccttgctgtccagtgctcacatgtccatattgcaaatggatacaagatatctggcaaggaagccccatatttctacaatgacactgtgacattcaagtgttatagtggatttactttgaagggcagtagtcagattcgttgcaaagctgataacacctgggatcctgaaataccagtttgtgaaaaagaaacatgccagcatgtgagacagagtcttcaagaacttccagctggttcacgtgtggagctagttaatacgtcctgccaagatgggtaccagttgactggacatgcttatcagatgtgtcaagatgctgaaaatggaatttggttcaaaaagattccactttgtaaagttattcactgtcaccctccaccagtgattgtcaatgggaagcacacagggatgatggcagaaaactttctatatggaaatgaagtctcttatgaatgtgaccaaggattctatctcctgggagagaaaaaattgcagtgcagaagtgattctaaaggacatggatcttggagcgggccttccccacagtgcttacgatctcctcctgtgactcgctgccctaatccagaagtcaaacatgggtacaagctcaataaaacacattctgcatattcccacaatgacatagtgtatgttgactgcaatcctggcttcatcatgaatggtagtcgcgtgattaggtgtcatactgataacacatgggtgccaggtgtgccaacttgtatgaaaaaagccttcatagggtgtccacctccgcctaagacccctaacgggaaccatactggtggaaacatagctcgattttctcctggaatgtcaatcctgtacagctgtgaccaaggctacctgctggtgggagaggcactccttctttgcacacatgagggaacctggagccaacctgcccctcattgtaaagaggtaaactgtagctcaccagcagatatggatggaatccagaaagggctggaaccaaggaaaatgtatcagtatggagctgttgtaactctggagtgtgaagatgggtatatgctggaaggcagtccccagagccagtgccaatcggatcaccaatggaaccctcccctggcggtttgcagatcccgttcacttgctcctgtcctttgtggtattgctgcaggtttgatacttcttaccttcttgattgtcattaccttatacgtgatatcaaaacacagagaacgcaattattatacagatacaagccagaaagaagcttttcatttagaagcacgagaagtatattctgttgatccatacaacccagccagctgatcagaagacaaactggtgtgtgcctcattgcttggaattcagcggaatattgattagaaagaaactgctctaatatcagcaagtctctttatatggcctcaagatcaatgaaatgatgtcataagcgatcacttcctatatgcacttattctcaagaagaacatctttatggtaaagatgggagcccagtttcactgccatatactcttcaaggactttctgaagcctcacttatgagatgcctgaagccaggccatggctataaacaattacatggctctaaaaagttttgccctttttaaggaaggcactaaaaagagctgtcctggtatctagacccatcttctttttgaaatcagcatactcaatgttactatctgcttttggttataatgtgtttttaattatctaaagtatgaagcattttctggggttatgatggccttacctttattaggaagtatggttttattttgatagtagcttcctcctctggtggtgttaatcatttcatttttacccttactgtttgagtttctctcacattactgtatatactttgcctttccataatcactcagtgattgcaatttgcacaagtttttttaaattatgggaatcaagatttaatcctagagatttggtgtacaattcaggctttggatgtttctttagcagttttgtgataagttctagttgcttgtaaaatttcacttaataatgtgtacattagtcattcaataaattgtaattgtaaagaaaa

SEQ ID NO: 107 - protein, 1033 aa, Homo sapiens
MGAAGLLGVFLALVAPGVLGISCGSPPPILNGRISYYSTPIAVGTVIRYSCSGTFRLIGEKSLLCITKDKVDGTWDKPAPKCEYFNKYSSCPEPIVPGGYKIRGSTPYRHGDSVTFACKTNFSMNGNKSVWCQANNMWGPTRLPTCVSVFPLECPALPMIHNGHHTSENVGSIAPGLSVTYSCESGYLLVGEKIINCLSSGKWSAVPPTCEEARCKSLGRFPNGKVKEPPILRVGVTANFFCDEGYRLQGPPSSRCVIAGQGVAWTKMPVCEEIFCPSPPPILNGRHIGNSLANVSYGSIVTYTCDPDPEEGVNFILIGESTLRCTVDSQKTGTWSGPAPRCELSTSAVQCPHPQILRGRMVSGQKDRYTYNDTVIFACMFGFTLKGSKQIRCNAQGTWEPSAPVCEKECQAPPNILNGQKEDRHMVRFDPGTSIKYSCNPGYVLVGEESIQCTSEGVWTPPVPQCKVAACEATGRQLLTKPQHQFVRPDVNSSCGEGYKLSGSVYQECQGTIPWFMEIRLCKEITCPPPPVIYNGAHTGSSLEDFPYGTTVTYTCNPGPERGVEFSLIGESTIRCTSNDQERGTWSGPAPLCKLSLLAVQCSHVHIANGYKISGKEAPYFYNDTVTFKCYSGFTLKGSSQIRCKADNTWDPEIPVCEKETCQHVRQSLQELPAGSRVELVNTSCQDGYQLTGHAYQMCQDAENGIWFKKIPLCKVIHCHPPPVIVNGKHTGMMAENFLYGNEVSYECDQGFYLLGEKKLQCRSDSKGHGSWSGPSPQCLRSPPVTRCPNPEVKHGYKLNKTHSAYSHNDIVYVDCNPGFIMNGSRVIRCHTDNTWVPGVPTCMKKAFIGCPPPPKTPNGNHTGGNIARFSPGMSILYSCDQGYLLVGEALLLCTHEGTWSQPAPHCKEVNCSSPADMDGIQKGLEPRKMYQYGAVVTLECEDGYMLEGSPQSQCQSDHQWNPPLAVCRSRSLAPVLCGIAAGLILLTFLIVITLYVISKHRERNYYTDTSQKEAFHLEAREVYSVDPYNPAS

SEQ ID NO: 108 - DNA, 1300 bp, Homo sapiens
ctgcagccggtgcagttacacgttttcctccaaggagcctcggacgttgtcacgggtttggggtcggggacagagcggtgaccatggccaggctggcgttgtctcctgtgcccagccactggatggtggcgttgctgctgctgctctcagctgagccagtaccagcagccagatcggaggaccggtaccggaatcccaaaggtagtgcttgttcgcggatctggcagagcccacgtttcatagccaggaaacggggcttcacggtgaaaatgcactgctacatgaacagcgcctccggcaatgtgagctggctctggaagcaggagatggacgagaatccccagcagctgaagctggaaaagggccgcatggaagagtcccagaacgaatctctcgccaccctcaccatccaaggcatccggtttgaggacaatggcatctacttctgtcagcagaagtgcaacaacacctcggaggtctaccagggctgcggcacagagctgcgagtcatgggattcagcaccttggcacagctgaagcagaggaacacgctgaaggatggtatcatcatgatccagacgctgctgatcatcctcttcatcatcgtgcctatcttcctgctgctggacaaggatgacagcaaggctggcatggaggaagatcacacctacgagggcctggacattgaccagacagccacctatgaggacatagtgacgctgcggacaggggaagtgaagtggtctgtaggtgagcacccaggccaggagtgagagccaggtcgccccatgacctgggtgcaggctccctggcctcagtgactgcttcggagctgcctggctcatggcccaacccctttcctggaccccccagctggcctctgaagctggcccaccagagctgccatttgtctccagcccctggtccccagctcttgccaaagggcctggagtagaaggacaacagggcagcaacttggagggagttctctggggatggacgggacccagccttctgggggtgctatgaggtgatccgtccccacacatgggatgggggaggcagagactggtccagagcccgcaaatggactcggagccgagggcctcccagcagagcttgggaagggccatggacccaactgggccccagaagagccacaggaacatcattcctctcccgcaaccactcccaccccagggaggccctggcctccagtgccttcccccgtggaataaacggtgtgtcctgagaaaccacaaaaaaaaaaaaaaaaaaaaaaaaaaaaaaaaaaaaaaaa

SEQ ID NO: 109 - protein, 229 aa, Homo sapiens
MARLALSPVPSHWMVALLLLLSAEPVPAARSEDRYRNPKGSACSRIWQSPRFIARKRGFTVKMHCYMNSASGNVSWLWKQEMDENPQQLKLEKGRMEESQNESLATLTIQGIRFEDNGIYFCQQKCNNTSEVYQGCGTELRVMGFSTLAQLKQRNTLKDGIIMIQTLLIILFIIVPIFLLLDKDDSKAGMEEDHTYEGLDIDQTATYEDIVTLRTGEVKWSVGEHPGQE

SEQ ID NO: 110 - DNA, 2592 bp, Homo sapiens
agagtctccagttggtgaccaagagtacatctcttttcaaatagctggattaggtcctcatgctgctgtggtcattgctggtcatctttgatgcagtcactgaacaggcagattcgctgacccttgtggcgccctcttctgtcttcgaaggagacagcatcgttctgaaatgccagggagaacagaactggaaaattcagaagatggcttaccataaggataacaaagagttatctgttttcaaaaaattctcagatttccttatccaaagtgcagttttaagtgacagtggtaactatttctgtagtaccaaaggacaactctttctctgggataaaacttcaaatatagtaaagataaaagtccaagagctctttcaacgtcctgtgctgactgccagctccttccagcccatcgaagggggtccagtgagcctgaaatgtgagacccggctctctccacagaggttggatgttcaactccagttctgcttcttcagagaaaaccaggtcctggggtcaggctggagcagctctccggagctccagatttctgccgtgtggagtgaagacacagggtcttactggtgcaaggcagaaacggtgactcacaggatcagaaaacagagcctccaatcccagattcacgtgcagagaatccccatctctaatgtaagcttggagatccgggcccccgggggacaggtgactgaaggacaaaaactgatcctgctctgctcagtggctgggggtacaggaaatgtcacattctcctggtacagagaggccacaggaaccagtatgggaaagaaaacccagcgttccctgtcagcagagctggagatcccagctgtgaaagagagtgatgccggcaaatattactgtagagctgacaacggccatgtgcctatccagagcaaggtggtgaatatccctgtgagaattccagtgtctcgccctgtcctcaccctcaggtctcctggggcccaggctgcagtgggggacctgctggagcttcactgtgaggccctgagaggctctcccccaatcttgtaccaattttatcatgaggatgtcacccttgggaacagctcggccccctctggaggaggggcctccttcaacctctctttgactgcagaacattctggaaactactcctgtgaggccaacaacggcctgggggcccagtgcagtgaggcagtgccagtctccatctcaggacctgatggctatagaagagacctcatgacagctggagttctctggggactgtttggtgtccttggtttcactggtgttgctttgctgttgtatgccttgttccacaagatatcaggagaaagttctgccactaatgaacccagaggggcttccaggccaaatcctcaagagttcacctattcaagcccaaccccagacatggaggagctgcagccagtgtatgtcaatgtgggctctgtagatgtggatgtggtttattctcaggtctggagcatgcagcagccagaaagctcagcaaacatcaggacacttctggagaacaaggactcccaagtcatctactcttctgtgaagaaatcataacacttggaggaatcagaagggaagatcaacagcaaggatggggcatcattaagacttgctataaaaccttatgaaaatgcttgaggcttatcacctgccacagccagaacgtgcctcaggaggcacctcctgtcatttttgtcctgatgatgtttcttctccaatatcttcttttacctatcaatattcattgaactgctgctacatccagacactgtgcaaataaattatttctgctaccttctcttaagcaatcagtgtgtaaagatttgagggaagaatgaataagagatacaaggtctcaccttcatctactgtgaagtgatgagaacaggacttgatagtggtgtattaacttatttatgtgctgctggatacagtttgctaatattttgttgagaatttttgcaaatatgttcattgggaatattggcctgaaattttcttttccactgtgtctctgccagaatgtttgtatcaggctgatgctggcttcatagaatgagttaggcaggagcccttcctccttgattttttggcatagtttcagcaggattggtaccagttattctttctgcatcttgtagaattcagctatgaatccatctggtctagggcttttgtgttggttggtaagttttttattactaattcaacttcagcgcttgatattggtctaggaggggtttctgtctcttcctggttcaatcttgggagattgtgtgtttccaggaatttagccgtttcctccagattttcttctttatgtgcatcgacttgagtgtaaacataacttatatgcactgggaaaccaaaaaatctgtgtgacttgctttattgcagcatttgttttattttggtagtctggaactgaacctgcaatatcaccaaagtatgcatatagttgcaaaaatgtgatttttgacatagtaaatatgagtatttgcaataaactatgatattacttttgtaagtatatagaataaaatgtaaataatctataaaa

SEQ ID NO: 111 - protein, 508 aa, Homo sapiens
MLLWSLLVIFDAVTEQADSLTLVAPSSVFEGDSIVLKCQGEQNWKIQKMAYHKDNKELSVFKKFSDFLIQSAVLSDSGNYFCSTKGQLFLWDKTSNIVKIKVQELFQRPVLTASSFQPIEGGPVSLKCETRLSPQRLDVQLQFCFFRENQVLGSGWSSSPELQISAVWSEDTGSYWCKAETVTHRIRKQSLQSQIHVQRIPISNVSLEIRAPGGQVTEGQKLILLCSVAGGTGNVTFSWYREATGTSMGKKTQRSLSAELEIPAVKESDAGKYYCRADNGHVPIQSKVVNIPVRIPVSRPVLTLRSPGAQAAVGDLLELHCEALRGSPPILYQFYHEDVTLGNSSAPSGGGASFNLSLTAEHSGNYSCEANNGLGAQCSEAVPVSISGPDGYRRDLMTAGVLWGLFGVLGFTGVALLLYALFHKISGESSATNEPRGASRPNPQEFTYSSPTPDMEELQPVYVNVGSVDVDVVYSQVWSMQQPESSANIRTLLENKDSQVIYSSVKKS

SEQ ID NO: 112 - DNA, 4530 bp, Homo sapiens
aattctcgagctcgtcgaccggtcgacgagctcgagggtcgacgagctcgagggcgcgcgcccggcccccacccctcgcagcaccccgcgccccgcgccctcccagccgggtccagccggagccatggggccggagccgcagtgagcaccatggagctggcggccttgtgccgctgggggctcctcctcgccctcttgccccccggagccgcgagcacccaagtgtgcaccggcacagacatgaagctgcggctccctgccagtcccgagacccacctggacatgctccgccacctctaccagggctgccaggtggtgcagggaaacctggaactcacctacctgcccaccaatgccagcctgtccttcctgcaggatatccaggaggtgcagggctacgtgctcatcgctcacaaccaagtgaggcaggtcccactgcagaggctgcggattgtgcgaggcacccagctctttgaggacaactatgccctggccgtgctagacaatggagacccgctgaacaataccacccctgtcacaggggcctccccaggaggcctgcgggagctgcagcttcgaagcctcacagagatcttgaaaggaggggtcttgatccagcggaacccccagctctgctaccaggacacgattttgtggaaggacatcttccacaagaacaaccagctggctctcacactgatagacaccaaccgctctcgggcctgccacccctgttctccgatgtgtaagggctcccgctgctggggagagagttctgaggattgtcagagcctgacgcgcactgtctgtgccggtggctgtgcccgctgcaaggggccactgcccactgactgctgccatgagcagtgtgctgccggctgcacgggccccaagcactctgactgcctggcctgcctccacttcaaccacagtggcatctgtgagctgcactgcccagccctggtcacctacaacacagacacgtttgagtccatgcccaatcccgagggccggtatacattcggcgccagctgtgtgactgcctgtccctacaactacctttctacggacgtgggatcctgcaccctcgtctgccccctgcacaaccaagaggtgacagcagaggatggaacacagcggtgtgagaagtgcagcaagccctgtgcccgagtgtgctatggtctgggcatggagcacttgcgagaggtgagggcagttaccagtgccaatatccaggagtttgctggctgcaagaagatctttgggagcctggcatttctgccggagagctttgatggggacccagcctccaacactgccccgctccagccagagcagctccaagtgtttgagactctggaagagatcacaggttacctatacatctcagcatggccggacagcctgcctgacctcagcgtcttccagaacctgcaagtaatccggggacgaattctgcacaatggcgcctactcgctgaccctgcaagggctgggcatcagctggctggggctgcgctcactgagggaactgggcagtggactggccctcatccaccataacacccacctctgcttcgtgcacacggtgccctgggaccagctctttcggaacccgcaccaagctctgctccacactgccaaccggccagaggacgagtgtgtgggcgagggcctggcctgccaccagctgtgcgcccgagggcactgctggggtccagggcccacccagtgtgtcaactgcagccagttccttcggggccaggagtgcgtggaggaatgccgagtactgcaggggctccccagggagtatgtgaatgccaggcactgtttgccgtgccaccctgagtgtcagccccagaatggctcagtgacctgttttggaccggaggctgaccagtgtgtggcctgtgcccactataaggaccctcccttctgcgtggcccgctgccccagcggtgtgaaacctgacctctcctacatgcccatctggaagtttccagatgaggagggcgcatgccagccttgccccatcaactgcacccactcctgtgtggacctggatgacaagggctgccccgccgagcagagagccagccctctgacgtccatcgtctctgcggtggttggcattctgctggtcgtggtcttgggggtggtctttgggatcctcatcaagcgacggcagcagaagatccggaagtacacgatgcggagactgctgcaggaaacggagctggtggagccgctgacacctagcggagcgatgcccaaccaggcgcagatgcggatcctgaaagagacggagctgaggaaggtgaaggtgcttggatctggcgcttttggcacagtctacaagggcatctggatccctgatggggagaatgtgaaaattccagtggccatcaaagtgttgagggaaaacacatcccccaaagccaacaaagaaatcttagacgaagcatacgtgatggctggtgtgggctccccatatgtctcccgccttctgggcatctgcctgacatccacggtgcagctggtgacacagcttatgccctatggctgcctcttagaccatgtccgggaaaaccgcggacgcctgggctcccaggacctgctgaactggtgtatgcagattgccaaggggatgagctacctggaggatgtgcggctcgtacacagggacttggccgctcggaacgtgctggtcaagagtcccaaccatgtcaaaattacagacttcgggctggctcggctgctggacattgacgagacagagtaccatgcagatgggggcaaggtgcccatcaagtggatggcgctggagtccattctccgccggcggttcacccaccagagtgatgtgtggagttatggtgtgactgtgtgggagctgatgacttttggggccaaaccttacgatgggatcccagcccgggagatccctgacctgctggaaaagggggagcggctgccccagccccccatctgcaccattgatgtctacatgatcatggtcaaatgttggatgattgactctgaatgtcggccaagattccgggagttggtgtctgaattctcccgcatggccagggacccccagcgctttgtggtcatccagaatgaggacttgggcccagccagtcccttggacagcaccttctaccgctcactgctggaggacgatgacatgggggacctggtggatgctgaggagtatctggtaccccagcagggcttcttctgtccagaccctgccccgggcgctgggggcatggtccaccacaggcaccgcagctcatctaccaggagtggcggtggggacctgacactagggctggagccctctgaagaggaggcccccaggtctccactggcaccctccgaaggggctggctccgatgtatttgatggtgacctgggaatgggggcagccaaggggctgcaaagcctccccacacatgaccccagccctctacagcggtacagtgaggaccccacagtacccctgccctctgagactgatggctacgttgcccccctgacctgcagcccccagcctgaatatgtgaaccagccagatgttcggccccagcccccttcgccccgagagggccctctgcctgctgcccgacctgctggtgccactctggaaagggccaagactctctccccagggaagaatggggtcgtcaaagacgtttttgcctttgggggtgccgtggagaaccccgagtacttgacaccccagggaggagctgcccctcagccccaccctcctcctgccttcagcccagccttcgacaacctctattactgggaccaggacccaccagagcggggggctccacccagcaccttcaaagggacacctacggcagagaacccagagtacctgggtctggacgtgccagtgtgaaccagaaggccaagtccgcagaagccctgatgtgtcctcagggagcagggaaggcctgacttctgctggcatcaagaggtgggagggccctccgaccacttccaggggaacctgccatgccaggaacctgtcctaaggaaccttccttcctgcttgagttcccagatggctggaaggggtccagcctcgttggaagaggaacagcactggggagtctttgtggattctgaggccctgcccaatgagactctagggtccagtggatgccacagcccagcttggccctttccttccagatcctgggtactgaaagccttagggaagctggcctgagaggggaagcggccctaagggagtgtctaagaacaaaagcgacccattcagagactgtccctgaaacctagtactgccccccatgaggaaggaacagcaatggtgtcagtatccaggctttgtacagagtgcttttctgtttagtttttactttttttgttttgtttttttaaagacgaaataaagacccaggggagaatgggtgttgtatggggaggcaagtgtggggggtccttctccacacccactttgtccatttgcaaatatattttggaaaac

SEQ ID NO: 113 - protein, 1255 aa, Homo sapiens
MELAALCRWGLLLALLPPGAASTQVCTGTDMKLRLPASPETHLDMLRHLYQGCQVVQGNLELTYLPTNASLSFLQDIQEVQGYVLIAHNQVRQVPLQRLRIVRGTQLFEDNYALAVLDNGDPLNNTTPVTGASPGGLRELQLRSLTEILKGGVLIQRNPQLCYQDTILWKDIFHKNNQLALTLIDTNRSRACHPCSPMCKGSRCWGESSEDCQSLTRTVCAGGCARCKGPLPTDCCHEQCAAGCTGPKHSDCLACLHFNHSGICELHCPALVTYNTDTFESMPNPEGRYTFGASCVTACPYNYLSTDVGSCTLVCPLHNQEVTAEDGTQRCEKCSKPCARVCYGLGMEHLREVRAVTSANIQEFAGCKKIFGSLAFLPESFDGDPASNTAPLQPEQLQVFETLEEITGYLYISAWPDSLPDLSVFQNLQVIRGRILHNGAYSLTLQGLGISWLGLRSLRELGSGLALIHHNTHLCFVHTVPWDQLFRNPHQALLHTANRPEDECVGEGLACHQLCARGHCWGPGPTQCVNCSQFLRGQECVEECRVLQGLPREYVNARHCLPCHPECQPQNGSVTCFGPEADQCVACAHYKDPPFCVARCPSGVKPDLSYMPIWKFPDEEGACQPCPINCTHSCVDLDDKGCPAEQRASPLTSIVSAVVGILLVVVLGVVFGILIKRRQQKIRKYTMRRLLQETELVEPLTPSGAMPNQAQMRILKETELRKVKVLGSGAFGTVYKGIWIPDGENVKIPVAIKVLRENTSPKANKEILDEAYVMAGVGSPYVSRLLGICLTSTVQLVTQLMPYGCLLDHVRENRGRLGSQDLLNWCMQIAKGMSYLEDVRLVHRDLAARNVLVKSPNHVKITDFGLARLLDIDETEYHADGGKVPIKWMALESILRRRFTHQSDVWSYGVTVWELMTFGAKPYDGIPAREIPDLLEKGERLPQPPICTIDVYMIMVKCWMIDSECRPRFRELVSEFSRMARDPQRFVVIQNEDLGPASPLDSTFYRSLLEDDDMGDLVDAEEYLVPQQGFFCPDPAPGAGGMVHHRHRSSSTRSGGGDLTLGLEPSEEEAPRSPLAPSEGAGSDVFDGDLGMGAAKGLQSLPTHDPSPLQRYSEDPTVPLPSETDGYVAPLTCSPQPEYVNQPDVRPQPPSPREGPLPAARPAGATLERAKTLSPGKNGVVKDVFAFGGAVENPEYLTPQGGAAPQPHPPPAFSPAFDNLYYWDQDPPERGAPPSTFKGTPTAENPEYLGLDVPV

SEQ ID NO: 114 - DNA, 2533 bp, Homo sapiens
ggagctcaagctcctctacaaagaggtggacagagaagacagcagagaccatgggacccccctcagcccctccctgcagattgcatgtcccctggaaggaggtcctgctcacagcctcacttctaaccttctggaacccacccaccactgccaagctcactattgaatccacgccattcaatgtcgcagaggggaaggaggttcttctactcgcccacaacctgccccagaatcgtattggttacagctggtacaaaggcgaaagagtggatggcaacagtctaattgtaggatatgtaataggaactcaacaagctaccccagggcccgcatacagtggtcgagagacaatataccccaatgcatccctgctgatccagaacgtcacccagaatgacacaggattctataccctacaagtcataaagtcagatcttgtgaatgaagaagcaaccggacagttccatgtatacccggagctgcccaagccctccatctccagcaacaactccaaccccgtggaggacaaggatgctgtggccttcacctgtgaacctgaggttcagaacacaacctacctgtggtgggtaaatggtcagagcctcccggtcagtcccaggctgcagctgtccaatggcaacatgaccctcactctactcagcgtcaaaaggaacgatgcaggatcctatgaatgtgaaatacagaacccagcgagtgccaaccgcagtgacccagtcaccctgaatgtcctctatggcccagatgtccccaccatttccccctcaaaggccaattaccgtccaggggaaaatctgaacctctcctgccacgcagcctctaacccacctgcacagtactcttggtttatcaatgggacgttccagcaatccacacaagagctctttatccccaacatcactgtgaataatagcggatcctatatgtgccaagcccataactcagccactggcctcaataggaccacagtcacgatgatcacagtctctggaagtgctcctgtcctctcagctgtggccaccgtcggcatcacgattggagtgctggccagggtggctctgatatagcagccctggtgtattttcgatatttcaggaagactggcagattggaccagaccctgaattcttctagctcctccaatcccattttatcccatggaaccactaaaaacaaggtctgctctgctcctgaagccctatatgctggagatggacaactcaatgaaaatttaaagggaaaaccctcaggcctgaggtgtgtgccactcagagacttcacctaactagagacagtcaaactgcaaaccatggtgagaaattgacgacttcacactatggacagcttttcccaagatgtcaaaacaagactcctcatcatgataaggctcttacccccttttaatttgtccttgcttatgcctgcctctttcgcttggcaggatgatgctgtcattagtatttcacaagaagtagcttcagagggtaacttaacagagtgtcagatctatcttgtcaatcccaacgttttacataaaataagagatcctttagtgcacccagtgactgacattagcagcatctttaacacagccgtgtgttcaaatgtacagtggtccttttcagagttggacttctagactcacctgttctcactccctgttttaattcaacccagccatgcaatgccaaataatagaattgctccctaccagctgaacagggaggagtctgtgcagtttctgacacttgttgttgaacatggctaaatacaatgggtatcgctgagactaagttgtagaaattaacaaatgtgctgcttggttaaaatggctacactcatctgactcattctttattctattttagttggtttgtatcttgcctaaggtgcgtagtccaactcttggtattaccctcctaatagtcatactagtagtcatactccctggtgtagtgtattctctaaaagctttaaatgtctgcatgcagccagccatcaaatagtgaatggtctctctttggctggaattacaaaactcagagaaatgtgtcatcaggagaacatcataacccatgaaggataaaagccccaaatggtggtaactgataatagcactaatgctttaagatttggtcacactctcacctaggtgagcgcattgagccagtggtgctaaatgctacatactccaactgaaatgttaaggaagaagatagatccaattaaaaaaaattaaaaccaatttaaaaaaaaaaaagaacacaggagattccagtctacttgagttagcataatacagaagtcccctctactttaacttttacaaaaaagtaacctgaactaatctgatgttaaccaatgtatttatttctgtggttctgtttccttgttccaatttgacaaaacccactgttcttgtattgtattgcccagggggagctatcactgtacttgtagagtggtgctgctttaattcataaatcacaaataaaagccaattagctctataact

SEQ ID NO: 115 - protein, 344 aa, Homo sapiens
MGPPSAPPCRLHVPWKEVLLTASLLTFWNPPTTAKLTIESTPFNVAEGKEVLLLAHNLPQNRIGYSWYKGERVDGNSLIVGYVIGTQQATPGPAYSGRETIYPNASLLIQNVTQNDTGFYTLQVIKSDLVNEEATGQFHVYPELPKPSISSNNSNPVEDKDAVAFTCEPEVQNTTYLWWVNGQSLPVSPRLQLSNGNMTLTLLSVKRNDAGSYECEIQNPASANRSDPVTLNVLYGPDVPTISPSKANYRPGENLNLSCHAASNPPAQYSWFINGTFQQSTQELFIPNITVNNSGSYMCQAHNSATGLNRTTVTMITVSGSAPVLSAVATVGITIGVLARVALI

SEQ ID NO: 116 - DNA, 1583 bp, Homo sapiens
gtgcctctcctggcaggcagagtggctcctcacagcctgaagctcatccttctgcacgggccagccaggccagcacagaggcaccagggcagcagtgcacacaggtccccggggaccccaccatgtggagcggatggtggctgtggccccttgtggccgtctgcactgcagacttctttcgggacgaggcagagaggatcatgagggactcccctgtcattgatgggcacaatgacctcccctggcagctgctggatatgttcaacaaccggctgcaggacgagagggccaacctgaccaccttggccggcacacacaccaacatccccaagctgagggccggctttgtgggaggccagttctggtccgtgtacacgccctgcgacacccagaacaaagacgccgtgcggaggacgctggagcagatggacgtggtccaccgcatgtgccggatgtacccggagaccttcctgtatgtcaccagcagtgcaggcattcggcaggccttccgggaagggaaggtggccagcctgatcggcgtggagggcggccactccattgacagcagtttgggcgtcctgcgggcactctatcagctgggcatgcggtacctgaccctcacccacagctgcaacacgccctgggctgacaactggctggtggacacgggagacagcgagccccagagccaaggcttgtcaccctttgggcagcgtgtggtgaaggagctgaaccgtctgggggtcctcatcgacttggctcacgtgtctgtggccaccatgaaggccaccctgcagctgtccagagccccggtcatcttcagccactcctcggcctacagcgtgtgcgcaagccggcgcaacgtgcctgacgacgtcctgaggctggtgaaacagacagacagcctggtgatggtgaacttctacaacaattacatttcctgcaccaacaaggccaacctgtcccaagtggccgaccatctggatcacatcaaggaggtggcaggagccagagccgtgggttttggtggggactttgatggtgttccaagggtccctgaggggctggaggacgtctccaagtatccagacctgatcgctgagctgctcaggaggaactggacggaggcggaggtcaagggcgcactggctgacaacctgctgagggtcttcgaggctgtggaacaggccagcaacctcacacaggctcccgaggaggagcccatcccgctggaccagctgggtggctcctgcaggacccattacggctactcctctggggcttccagcctccatcgccactgggggctcctgctggcctccctcgctcccctggtcctctgtctgtctctcctgtgaaacctgggagaccagagtcccctttagggttcccggagctccgggaagacccgcccatcccaggactccagatgccaggagccctgctgcccacatgcaaggaccagcatctcctgagaggacgcctgggcttacctggggggcaggatgcctggggacagttcaggacacacacacagtaggcccgcaataaaagcaacaccccttcaaaaaaaaaaaaaaaaa

SEQ ID NO: 117 - protein, 411 aa, Homo sapiens
MWSGWWLWPLVAVCTADFFRDEAERIMRDSPVIDGHNDLPWQLLDMFNNRLQDERANLTTLAGTHTNIPKLRAGFVGGQFWSVYTPCDTQNKDAVRRTLEQMDVVHRMCRMYPETFLYVTSSAGIRQAFREGKVASLIGVEGGHSIDSSLGVLRALYQLGMRYLTLTHSCNTPWADNWLVDTGDSEPQSQGLSPFGQRVVKELNRLGVLIDLAHVSVATMKATLQLSRAPVIFSHSSAYSVCASRRNVPDDVLRLVKQTDSLVMVNFYNNYISCTNKANLSQVADHLDHIKEVAGARAVGFGGDFDGVPRVPEGLEDVSKYPDLIAELLRRNWTEAEVKGALADNLLRVFEAVEQASNLTQAPEEEPIPLDQLGGSCRTHYGYSSGASSLHRHWGLLLASLAPLVLCLSLL

SEQ ID NO: 118 - DNA, 3485 bp, Homo sapiens
tccagctgggtagccgggggagcgcgcgtgggggctccgcgagtcgctcgcccttggtttctggggaagcctgggggacgcggctgtggcggaggcgccctgggactcaggtcgcctggagcgtggcacgcagagccccaggcgcggagctgaggccgcgcggccgcgcttggccccagcgggcgtgggactgagcagtctgctgccccccgacatgtgacccagccccgccgcccatgcgggctcccggccgcccggccctgcggccgctgccgctgccgccgctgctgctgttgctcctggcggcgccttggggacgggcagttccctgtgtctctggtggtttgcctaaacctgcaaacatcaccttcttatccatcaacatgaagaatgtcctacaatggactccaccagagggtcttcaaggagttaaagttacttacactgtgcagtatttcatatatgggcaaaagaaatggctgaataaatcagaatgcagaaatatcaatagaacctactgtgatctttctgctgaaacttctgactacgaacaccagtattatgccaaagttaaggccatttggggaacaaagtgttccaaatgggctgaaagtggacggttctatccttttttagaaacacaaattggcccaccagaggtggcactgactacagatgagaagtccatttctgttgtcctgacagctccagagaagtggaagagaaatccagaagaccttcctgtttccatgcaacaaatatactccaatctgaagtataacgtgtctgtgttgaatactaaatcaaacagaacgtggtcccagtgtgtgaccaaccacacgctggtgctcacctggctggagccgaacactctttactgcgtacacgtggagtccttcgtcccagggccccctcgccgtgctcagccttctgagaagcagtgtgccaggactttgaaagatcaatcatcagagttcaaggctaaaatcatcttctggtatgttttgcccatatctattaccgtgtttcttttttctgtgatgggctattccatctaccgatatatccacgttggcaaagagaaacacccagcaaatttgattttgatttatggaaatgaatttgacaaaagattctttgtgcctgctgaaaaaatcgtgattaactttatcaccctcaatatctcggatgattctaaaatttctcatcaggatatgagtttactgggaaaaagcagtgatgtatccagccttaatgatcctcagcccagcgggaacctgaggccccctcaggaggaagaggaggtgaaacatttagggtatgcttcgcatttgatggaaattttttgtgactctgaagaaaacacggaaggtacttctttcacccagcaagagtccctcagcagaacaatacccccggataaaacagtcattgaatatgaatatgatgtcagaaccactgacatttgtgcggggcctgaagagcaggagctcagtttgcaggaggaggtgtccacacaaggaacattattggagtcgcaggcagcgttggcagtcttgggcccgcaaacgttacagtactcatacacccctcagctccaagacttagaccccctggcgcaggagcacacagactcggaggaggggccggaggaagagccatcgacgaccctggtcgactgggatccccaaactggcaggctgtgtattccttcgctgtccagcttcgaccaggattcagagggctgcgagccttctgagggggatgggctcggagaggagggtcttctatctagactctatgaggagccggctccagacaggccaccaggagaaaatgaaacctatctcatgcaattcatggaggaatgggggttatatgtgcagatggaaaactgatgccaacacttccttttgccttttgtttcctgtgcaaacaagtgagtcacccctttgatcccagccataaagtacctgggatgaaagaagttttttccagtttgtcagtgtctgtgagaattacttatttcttttctctattctcatagcacgtgtgtgattggttcatgcatgtaggtctcttaacaatgatggtgggcctctggagtccaggggctggccggttgttctatgcagagaaagcagtcaataaatgtttgccagactgggtgcagaatttattcaggtgggtgtactctggcctcttggttcattattttcaaacaagcacacttgtacaattattttctgggtacttcccatatgcacatagcactgtaaaaaatatttcccaaagatcactcattttataaataccactttttcagaattgggtttattgcgagcaggaggagatacttaaaacatgcacatataccaggttggtggtaagttggtcacatgtgaaaacctcaactatttaatcatcatgattcatattttgagtgaatacatcaggcacagaccttcatgatatcacacactcttggctactttaagaggccatctttaatactttatgagtagttctggagtgtaaacataaacgagtattcttttgtagtcagaaaagtgtcctctcaataatttagtaggggcttattgtctctcaaaactaacctaaaagaaaatgacacattttataatagaatattacatttatttctggaagtgtgttttcaaaaagatatttacatagtctgtaaactagaaagtgttaggtaaagctctaggttactgtgttactattataatattaaacattcgaataggcagtcgttcaaagactctttggaatatctatgaatgaatatcctctattcttataatattaaaacccataagtaaatataggacatacaagagaaatgagttaaatgactatgtaagggagagtttattaaaatttgatgaaatttactgtaggaactaaactatgccataaaacaatagctttctagttcatttccagtaactgttcccatctcctttaccacttgttaagaaaattaaattcttcagtcacgctgctttaaaatgggacaaaatctattaagttgaaccatatataattgtggatatttggctgtttttaatctgacaagcagtaacttcatatggtttgccttaatatatatttgttttagtcatgaactcataatccattgatgctctttcatgagaagagatatgacccatatttccttattgatattattggtacaggcagacaaccctggtaggagagatggattctggggtcatgacctttcgtgattatccgcaaatgcaaacagtttcagatctaatggtttaatttagggagtaattatattaatcagagtgttctgttattctcaatctttatagaaacgattctgctggttttgaagaacagatgtattacactaactgtaaaagtagttcaagagtgagaaagaataaattgttattaagagcaaaagaaaaataaagtgattgatgata

SEQ ID NO: 119 - protein, 553 aa, Homo sapiens [sequence omitted]

SEQ ID NO: 120 - DNA, 2558 bp, Homo sapiens
tgtggcactgcctgcgtacccaaccccagccctgggtagcctgcagcatggcccagctgttcctgcccctgctggcagccctggtcctggcccaggctcctgcagctttagcagatgttctggaaggagacagctcagaggaccgcgcttttcgcgtgcgcatcgcgggcgacgcgccactgcagggcgtgctcggcggcgccctcaccatcccttgccacgtccactacctgcggccaccgccgagccgccgggctgtgctgggctctccgcgggtcaagtggactttcctgtcccggggccgggaggcagaggtgctggtggcgcggggagtgcgcgtcaaggtgaacgaggcctaccggttccgcgtggcactgcctgcgtacccagcgtcgctcaccgacgtctccctggcgctgagcgagctgcgccccaacgactcaggtatctatcgctgtgaggtccagcacggcatcgatgacagcagcgacgctgtggaggtcaaggtcaaaggggtcgtctttctctaccgagagggctctgcccgctatgctttctccttttctggggcccaggaggcctgtgcccgcattggagcccacatcgccaccccggagcagctctatgccgcctaccttgggggctatgagcaatgtgatgctggctggctgtcggatcagaccgtgaggtatcccatccagaccccacgagaggcctgttacggagacatggatggcttccccggggtccggaactatggtgtggtggacccggatgacctctatgatgtgtactgttatgctgaagacctaaatggagaattgttcctgggtgaccctccagagaagctgacattggaggaagcacgggcgtactgccaggagcggggtgcagagattgccaccacgggccaactgtatgcagcctgggatggtggcctggaccactgcagcccagggtggctagctgatggcagtgtgcgctaccccatcgtcacacccagccagcgctgtggtgggggcttgcctggtgtcaagactctcttcctcttccccaaccagactggcttccccaataagcacagccgcttcaacgtctactgcttccgagactcggcccagccttctgccatccctgaggcctccaacccagcctccaacccagcctctgatggactagaggctatcgtcacagtgacagagaccctggaggaactgcagctgcctcaggaagccacagagagtgaatcccgtggggccatctactccatccccatcatggaggacggaggaggtggaagctccactccagaagacccagcagaggcccctaggacgctcctagaatttgaaacacaatccatggtaccgcccacggggttctcagaagaggaaggtaaggcattggaggaagaagagaaatatgaagatgaagaagagaaagaggaggaagaagaagaggaggaggtggaggatgaggctctgtgggcatggcccagcgagctcagcagcccgggccctgaggcctctctccccactgagccagcagcccaggaggagtcactctcccaggcgccagcaagggcagtcctgcagcctggtgcatcaccacttcctgatggagagtcagaagcttccaggcctccaagggtccatggaccacctactgagactctgcccactcccagggagaggaacctagcatccccatcaccttccactctggttgaggcaagagaggtgggggaggcaactggtggtcctgagctatctggggtccctcgaggagagagcgaggagacaggaagctccgagggtgccccttccctgcttccagccacacgggcccctgagggtaccagggagctggaggccccctctgaagataattctggaagaactgccccagcagggacctcagtgcaggcccagccagtgctgcccactgacagcgccagccgaggtggagtggccgtggtccccgcatcaggtaattctgcccaaggctcaactgccctctctatcctactccttttcttccccctgcagctctgggtcacctgacctgtagtcctttaacccaccatcatcccaaactctcctgtcctttgccttcattctcttacccacctctacctatgggtctccaatctcggatatccaccttgtgggtatctcagctctccgcgtctttaccctgtgatcccagccccgccactgaccatctgtgacccttccctgccattgggccctccacctgtggctcacatctcgccagccccacagagcatcctcaggcctctccaagggtcctcatcacctattgcagccttcagggctcggcctattttccactactcccttcatccgcctgtgtgccgtcccctttagctgcctcctattgatctcagggaagcctgggagtcccttctcacccctcaacctccggagtccaggagaacccgtacccccacagagccttaagcaactacttctgtgaagtattttttgactgtttcatggaaaacaagccttggaaataaatctctattaaaccgc

SEQ ID NO: 121 - protein, 671 aa, Homo sapiens
MAQLFLPLLAALVLAQAPAALADVLEGDSSEDRAFRVRIAGDAPLQGVLGGALTIPCHVHYLRPPPSRRAVLGSPRVKWTFLSRGREAEVLVARGVRVKVNEAYRFRVALPAYPASLTDVSLALSELRPNDSGIYRCEVQHGIDDSSDAVEVKVKGVVFLYREGSARYAFSFSGAQEACARIGAHIATPEQLYAAYLGGYEQCDAGWLSDQTVRYPIQTPREACYGDMDGFPGVRNYGVVDPDDLYDVYCYAEDLNGELFLGDPPEKLTLEEARAYCQERGAEIATTGQLYAAWDGGLDHCSPGWLADGSVRYPIVTPSQRCGGGLPGVKTLFLFPNQTGFPNKHSRFNVYCFRDSAQPSAIPEASNPASNPASDGLEAIVTVTETLEELQLPQEATESESRGAIYSIPIMEDGGGGSSTPEDPAEAPRTLLEFETQSMVPPTGFSEEEGKALEEEEKYEDEEEKEEEEEEEEVEDEALWAWPSELSSPGPEASLPTEPAAQEESLSQAPARAVLQPGASPLPDGESEASRPPRVHGPPTETLPTPRERNLASPSPSTLVEAREVGEATGGPELSGVPRGESEETGSSEGAPSLLPATRAPEGTRELEAPSEDNSGRTAPAGTSVQAQPVLPTDSASRGGVAVVPASGNSAQGSTALSILLLFFPLQLWVT

SEQ ID NO: 122 - DNA, 4869 bp, Homo sapiens
cattctgctggctgcgcggtggcggcggctgtgtgtgcgccgcgccttgccgccccccctggccccccgagcccggggcgcgcgctcccgcccgggccgtccgggccccgcggcgccgcggcccgaggccccgggaagcgcagccatggctctgcggaggctgggggccgcgctgctgctgctgccgctgctcgccgccgtggaagaaacgctaatggactccactacagcgactgctgagctgggctggatggtgcatcctccatcagggtgggaagaggtgagtggctacgatgagaacatgaacacgatccgcacgtaccaggtgtgcaacgtgtttgagtcaagccagaacaactggctacggaccaagtttatccggcgccgtggcgcccaccgcatccacgtggagatgaagttttcggtgcgtgactgcagcagcatccccagcgtgcctggctcctgcaaggagaccttcaacctctattactatgaggctgactttgactcggccaccaagaccttccccaactggatggagaatccatgggtgaaggtggataccattgcagccgacgagagcttctcccaggtggacctgggtggccgcgtcatgaaaatcaacaccgaggtgcggagcttcggacctgtgtcccgcagcggcttctacctggccttccaggactatggcggctgcatgtccctcatcgccgtgcgtgtcttctaccgcaagtgcccccgcatcatccagaatggcgccatcttccaggaaaccctgtcgggggctgagagcacatcgctggtggctgcccggggcagctgcatcgccaatgcggaagaggtggatgtacccatcaagctctactgtaacggggacggcgagtggctggtgcccatcgggcgctgcatgtgcaaagcaggcttcgaggccgttgagaatggcaccgtctgccgaggttgtccatctgggactttcaaggccaaccaaggggatgaggcctgtacccactgtcccatcaacagccggaccacttctgaaggggccaccaactgtgtctgccgcaatggctactacagagcagacctggaccccctggacatgccctgcacaaccatcccctccgcgccccaggctgtgatttccagtgtcaatgagacctccctcatgctggagtggacccctccccgcgactccggaggccgagaggacctcgtctacaacatcatctgcaagagctgtggctcgggccggggtgcctgcacccgctgcggggacaatgtacagtacgcaccacgccagctaggcctgaccgagccacgcatttacatcagtgacctgctggcccacacccagtacaccttcgagatccaggctgtgaacggcgttactgaccagagccccttctcgcctcagttcgcctctgtgaacatcaccaccaaccaggcagctccatcggcagtgtccatcatgcatcaggtgagccgcaccgtggacagcattaccctgtcgtggtcccagccggaccagcccaatggcgtgatcctggactatgagctgcagtactatgagaaggagctcagtgagtacaacgccacagccataaaaagccccaccaacacggtcaccgtgcagggcctcaaagccggcgccatctatgtcttccaggtgcgggcacgcaccgtggcaggctacgggcgctacagcggcaagatgtacttccagaccatgacagaagccgagtaccagacaagcatccaggagaagttgccactcatcatcggctcctcggccgctggcctggtcttcctcattgctgtggttgtcatcgccatcgtgtgtaacagaagacgggggtttgagcgtgctgactcggagtacacggacaagctgcaacactacaccagtggccacatgaccccaggcatgaagatctacatcgatcctttcacctacgaggaccccaacgaggcagtgcgggagtttgccaaggaaattgacatctcctgtgtcaaaattgagcaggtgatcggagcaggggagtttggcgaggtctgcagtggccacctgaagctgccaggcaagagagagatctttgtggccatcaagacgctcaagtcgggctacacggagaagcagcgccgggacttcctgagcgaagcctccatcatgggccagttcgaccatcccaacgtcatccacctggagggtgtcgtgaccaagagcacacctgtgatgatcatcaccgagttcatggagaatggctccctggactcctttctccggcaaaacgatgggcagttcacagtcatccagctggtgggcatgcttcggggcatcgcagctggcatgaagtacctggcagacatgaactatgttcaccgtgacctggctgcccgcaacatcctcgtcaacagcaacctggtctgcaaggtgtcggactttgggctctcacgctttctagaggacgatacctcagaccccacctacaccagtgccctgggcggaaagatccccatccgctggacagccccggaagccatccagtaccggaagttcacctcggccagtgatgtgtggagctacggcattgtcatgtgggaggtgatgtcctatggggagcggccctactgggacatgaccaaccaggatgtaatcaatgccattgagcaggactatcggctgccaccgcccatggactgcccgagcgccctgcaccaactcatgctggactgttggcagaaggaccgcaaccaccggcccaagttcggccaaattgtcaacacgctagacaagatgatccgcaatcccaacagcctcaaagccatggcgcccctctcctctggcatcaacctgccgctgctggaccgcacgatccccgactacaccagctttaacacggtggacgagtggctggaggccatcaagatggggcagtacaaggagagcttcgccaatgccggcttcacctcctttgacgtcgtgtctcagatgatgatggaggacattctccgggttggggtcactttggctggccaccagaaaaaaatcctgaacagtatccaggtgatgcgggcgcagatgaaccagattcagtctgtggaggtttgacattcacctgcctcggctcacctcttcctccaagccccgccccctctgccccacgtgccggccctcctggtgctctatccactgcagggccagccactcgccaggaggccacgggccacgggaagaaccaagcggtgccagccacgagacgtcaccaagaaaacatgcaactcaaacgacggaaaaaaaaagggaatgggaaaaaagaaaacagatcctgggagggggcgggaaatacaaggaatattttttaaagaggattctcataaggaaagcaatgactgttcttgcgggggataaaaaagggcttgggagattcatgcgatgtgtccaatcggagacaaaagcagtttctctccaactccctctgggaaggtgacctggccagagccaagaaacactttcagaaaaacaaatgtgaaggggagagacaggggccgcccttggctcctgtccctgctgctcctctaggcctcactcaacaaccaagcgcctggaggacgggacagatggacagacagccaccctgagaacccctctgggaaaatctattcctgccaccactgggcaaacagaagaatttttctgtctttggagagtattttagaaactccaatgaaagacactgtttctcctgttggctcacagggctgaaaggggcttttgtcctcctgggtcagggagaacgcggggaccccagaaaggtcagccttcctgaggatgggcaacccccaggtctgcagctccaggtacatatcacgcgcacagcctggcagcctggccctcctggtgcccactcccgccagcccctgcctcgaggactgatactgcagtgactgccgtcagctccgactgccgctgagaagggttgatcctgcatctgggtttgtttacagcaattcctggactcgggggtattttggtcacagggtggttttggtttagggggtttgtttgttgggttgttttttgttttttggttttttttaatgacaatgaagtgacactttgacatttcctaccttttgaggacttgatccttctccaggaagaaggtgctttctgcttactgacttaggcaatacaccaagggcgagattttatatgcacatttctggatttttttatacggttttcattgacactcttccctcctcccacctgccaccaggcctcaccaaagcccactgccatggggccatctgggccattcagagactggagtgagatttgggtgtggagggggaggcgccaaggtggaggagcttcccactccaggactgttgatgaaagggacagattgaggaggaagtgggctctgaggctgcagggctggaagtccttgcccacttcccactctcctgccccaatctatctagtacttcccaggcaaataggcccctttgaggctcctgagtgccctcagatggtcaaaacccagttttccctctgggagcctaaaccaggctgcatcggaggccaggacccggatcattcactgtgataccctgccctccagagggtgcgctcagagacacgggcaagcatgcctcttcccttccctggagagaaagtgtgtgatttctctcccacctccttccccccaccagacctttgctgggcctaaaggtcttggccatggggacgccctcagtctagggatctggccacagactccctcctgtgaaccaacacagacacccaagcagagcaatcagttagtgaattgaatggaaataaacgctttagttataatatga

SEQ ID NO: 123 - protein, 987 aa, Homo sapiens
MALRRLGAALLLLPLLAAVEETLMDSTTATAELGWMVHPPSGWEEVSGYDENMNTIRTYQVCNVFESSQNNWLRTKFIRRRGAHRIHVEMKFSVRDCSSIPSVPGSCKETFNLYYYEADFDSATKTFPNWMENPWVKVDTIAADESFSQVDLGGRVMKINTEVRSFGPVSRSGFYLAFQDYGGCMSLIAVRVFYRKCPRIIQNGAIFQETLSGAESTSLVAARGSCIANAEEVDVPIKLYCNGDGEWLVPIGRCMCKAGFEAVENGTVCRGCPSGTFKANQGDEACTHCPINSRTTSEGATNCVCRNGYYRADLDPLDMPCTTIPSAPQAVISSVNETSLMLEWTPPRDSGGREDLVYNIICKSCGSGRGACTRCGDNVQYAPRQLGLTEPRIYISDLLAHTQYTFEIQAVNGVTDQSPFSPQFASVNITTNQAAPSAVSIMHQVSRTVDSITLSWSQPDQPNGVILDYELQYYEKELSEYNATAIKSPTNTVTVQGLKAGAIYVFQVRARTVAGYGRYSGKMYFQTMTEAEYQTSIQEKLPLIIGSSAAGLVFLIAVVVIAIVCNRRRGFERADSEYTDKLQHYTSGHMTPGMKIYIDPFTYEDPNEAVREFAKEIDISCVKIEQVIGAGEFGEVCSGHLKLPGKREIFVAIKTLKSGYTEKQRRDFLSEASIMGQFDHPNVIHLEGVVTKSTPVMIITEFMENGSLDSFLRQNDGQFTVIQLVGMLRGIAAGMKYLADMNYVHRDLAARNILVNSNLVCKVSDFGLSRFLEDDTSDPTYTSALGGKIPIRWTAPEAIQYRKFTSASDVWSYGIVMWEVMSYGERPYWDMTNQDVINAIEQDYRLPPPMDCPSALHQLMLDCWQKDRNHRPKFGQIVNTLDKMIRNPNSLKAMAPLSSGINLPLLDRTIPDYTSFNTVDEWLEAIKMGQYKESFANAGFTSFDVVSQMMMEDILRVGVTLAGHQKKILNSIQVMRAQMNQIQSVEV

SEQ ID NO: 124 - DNA, 1658 bp, Homo sapiens
ggaaggcagcggcagctccactcagccagtacccagatacgctgggaaccttccccagccatggcttccctggggcagatcctcttctggagcataattagcatcatcattattctggctggagcaattgcactcatcattggctttggtatttcagggagacactccatcacagtcactactgtcgcctcagctgggaacattggggaggatggaatcctgagctgcacttttgaacctgacatcaaactttctgatatcgtgatacaatggctgaaggaaggtgttttaggcttggtccatgagttcaaagaaggcaaagatgagctgtcggagcaggatgaaatgttcagaggccggacagcagtgtttgctgatcaagtgatagttggcaatgcctctttgcggctgaaaaacgtgcaactcacagatgctggcacctacaaatgttatatcatcacttctaaaggcaaggggaatgctaaccttgagtataaaactggagccttcagcatgccggaagtgaatgtggactataatgccagctcagagaccttgcggtgtgaggctccccgatggttcccccagcccacagtggtctgggcatcccaagttgaccagggagccaacttctcggaagtctccaataccagctttgagctgaactctgagaatgtgaccatgaaggttgtgtctgtgctctacaatgttacgatcaacaacacatactcctgtatgattgaaaatgacattgccaaagcaacaggggatatcaaagtgacagaatcggagatcaaaaggcggagtcacctacagctgctaaactcaaaggcttctctgtgtgtctcttctttctttgccatcagctgggcacttctgcctctcagcccttacctgatgctaaaataatgtgccttggccacaaaaaagcatgcaaagtcattgttacaacagggatctacagaactatttcaccaccagatatgacctagttttatatttctgggaggaaatgaattcatatctagaagtctggagtgagcaaacaagagcaagaaacaaaaagaagccaaaagcagaaggctccaatatgaacaagataaatctatcttcaaagacatattagaagttgggaaaataattcatgtgaactagacaagtgtgttaagagtgataagtaaaatgcacgtggagacaagtgcatccccagatctcagggacctccccctgcctgtcacctggggagtgagaggacaggatagtgcatgttctttgtctctgaatttttagttatatgtgctgtaatgttgctctgaggaagcccctggaaagtctatcccaacatatccacatcttatattccacaaattaagctgtagtatgtaccctaagacgctgctaattgactgccacttcgcaactcaggggcggctgcattttagtaatgggtcaaatgattcactttttatgatgcttccaaaggtgccttggcttctcttcccaactgacaaatgccaaagttgagaaaaatgatcataattttagcataaacagagcagtcggggacaccgattttataaataaactgagcaccttctttttaaacaaaaaaaaaaaaaaaaaaaaaaaaaaaaaaaaaaaaaaaaaaaaaaaaaaaa

SEQ ID NO: 125 - DNA, 946 bp, Homo sapiens
tgacagcccaccagtgaccatgaaggctgtgctgcttgccctgttgatggcaggcttggccctgcagccaggcactgccctgctgtgctactcctgcaaagcccaggtgagcaacgaggactgcctgcaggtggagaactgcacccagctgggggagcagtgctggaccgcgcgcatccgcgcagttggcctcctgaccgtcatcagcaaaggctgcagcttgaactgcgtggatgactcacaggactactacgtgggcaagaagaacatcacgtgctgtgacaccgacttgtgcaacgccagcggggcccatgccctgcagccggctgccgccatccttgcgctgctccctgcactcggcctgctgctctggggacccggccagctataggctctggggggccccgctgcagcccacactgggtgtggtgccccaggcctctgtgccactcctcacagacctggcccagtgggagcctgtcctggttcctgaggcacatcctaacgcaagtctgaccatgtatgtttgcacccctgtcccccaccctgaccctcccatggccctctccaggactcccacccggcagatcagctctagtgacacagatccgcctgcagatggcccctccaaccctctctgctgctgtttccatggcccagcattctccacccttaaccctgtgctcaggcacctcttcccccaggaagccttccctgcccaccccatctatgacttgagccaggtctggtccgtggtgtcccccgcacccagcaggggacaggcactcaggagggcccagtaaaggctgagatgaagtggactgagtagaactggaggacaagagtcgacgtgagttcctgggagtctccagagatggggcctggaggcctggaggaaggggccaggcctcacattcgtggggctccctgaatggcagcctgagca

SEQ ID NO: 126 - protein, 123 aa, Homo sapiens
MKAVLLALLMAGLALQPGTALLCYSCKAQVSNEDCLQVENCTQLGEQCWTARIRAVGLLTVISKGCSLNCVDDSQDYYVGKKNITCCDTDLCNASGAHALQPAAAILALLPALGLLLWGPGQL

SEQ ID NO: 127 - DNA, 1852 bp, Homo sapiens
ctgggctgaggcggaggcaggggagttgcagcgcgcgaggctccgtgagtgtgtctcctgcgcgctgagaggcggggggaggcggaggaccaggaggaggaggaggaggaggaggagggggagaatgcccggagccgccgccgctgccgccgccgccgccgccgcgatgctcccggctcaggaggctgccaagctgtaccacaccaactatgtgcggaactcgcgggccatcggcgtgctgtgggccatcttcaccatctgctttgccatcgtcaacgtggtgtgcttcatccagccctactggataggcgacggcgtggacaccccgcaagccggctatttcgggctcttccactactgcatcggcaacggcttctcccgggagctgacctgcaggggcagcttcacggacttctccacgctgccctcgggcgccttcaaagccgcctccttctttatcggcctctccatgatgctcatcattgcctgcatcatttgctttaccctcttcttcttctgcaacacggccactgtgtacaagatatgtgcctggatgcagctcacctccgctgcctgccttgtgcttggctgtatgattttccctgatggctgggactcagatgaagtaaaacggatgtgtggagaaaagacagacaagtacactcttggggcttgctcagtccgctgggcatacatcctggctattattggaattttggatgccctgatcctctcatttctagcatttgtgcttggtaatcgacaagacagcttgatggcagaggaactgaaggcagaaaacaaagttctgctaagccaatattctctagaatgagcacaaaacaaatcgaataacagctaaacaaatcgaataacagctaaacgaatcgaataacagcttttgtacatcaacatcaagaaggaatacgcctgagagagatcagagtatatagatgaatatgaacaagaatggaacattcacttgtcaacgcactttctaaatctagatcagcagagatgggagtgattttctggaaagagatgtgatcatggattaaacaccagctcattggaaactcattggatgagatcagaaaacgttcatgaaaaatcatattcaggaaataaggaagaggaatataaatgctctagagttaacatgtaaaatatatacgtactgaggtttgtaaactgtcctttttaaatcaaactgaaaacaaaaagctttaacctttcaacagaatttttaaaaaggcagttagttctaaattattcctatctcaatagccaagaggctgatcaagcgtcatttattgaggaagcatcttagaaaatgcctctgaatgttttcataggagccgtgacctttggttcttcatctctaccattcatttacttcactgtgtaattagttacaaccactcagttattaagagacgtaacgcttcaaactttttaccaagtctgtgttctgtttaatctgtccatacaagttattactgagaaagtgtttatgccatatactattactccatcaagctgtatattacaggaagtacatctttacatcataggttcccaagcaacatagatttccctatctttcaggaaacagcatcaaggaactctgaaaaatatagaaaaagttcattttcaccttggaagctcacgtgtaatattataggctactatcaaataaacactttttttctaattctccctagtatatgcataggaatttaatatactttataaataagtatctaaaatgtctcctacttttttcctatttctttgccatacatgttatcagaaatccatgtcttctatttcccttactgatgggcactca

SEQ ID NO: 128 - protein, 236 aa, Homo sapiens
MPGAAAAAAAAAAAMLPAQEAAKLYHTNYVRNSRAIGVLWAIFTICFAIVNVVCFIQPYWIGDGVDTPQAGYFGLFHYCIGNGFSRELTCRGSFTDFSTLPSGAFKAASFFIGLSMMLIIACIICFTLFFFCNTATVYKICAWMQLTSAACLVLGCMIFPDGWDSDEVKRMCGEKTDKYTLGACSVRWAYILAIIGILDALILSFLAFVLGNRQDSLMAEELKAENKVLLSQYSLE

SEQ ID NO: 129 - DNA, 1052 bp, Homo sapiens
tgccaagccctgccatgtagtgcacgcaggacatcaacaaacacagataacaggaaatgatccattccctgtggtcacttattctaaaggccccaaccttcaaagttcaagtagtgatatggatgactccacagaaagggagcagtcacgccttacttcttgccttaagaaaagagaagaaatgaaactgaaggagtgtgtttccatcctcccacggaaggaaagcccctctgtccgatcctccaaagacggaaagctgctggctgcaaccttgctgctggcactgctgtcttgctgcctcacggtggtgtctttctaccaggtggccgccctgcaaggggacctggccagcctccgggcagagctgcagggccaccacgcggagaagctgccagcaggagcaggagcccccaaggccggcctggaggaagctccagctgtcaccgcgggactgaaaatctttgaaccaccagctccaggagaaggcaactccagtcagaacagcagaaataagcgtgccgttcagggtccagaagaaacagtcactcaagactgcttgcaactgattgcagacagtgaaacaccaactatacaaaaaggatcttacacatttgttccatggcttctcagctttaaaaggggaagtgccctagaagaaaaagagaataaaatattggtcaaagaaactggttacttttttatatatggtcaggttttatatactgataagacctacgccatgggacatctaattcagaggaagaaggtccatgtctttggggatgaattgagtctggtgactttgtttcgatgtattcaaaatatgcctgaaacactacccaataattcctgctattcagctggcattgcaaaactggaagaaggagatgaactccaacttgcaataccaagagaaaatgcacaaatatcactggatggagatgtcacattttttggtgcattgaaactgctgtgacctacttacaccatgtctgtagctattttcctccctttctctgtacctctaagaagaaagaatctaactgaaaata

SEQ ID NO: 130 - protein, 285 aa, Homo sapiens
MDDSTEREQSRLTSCLKKREEMKLKECVSILPRKESPSVRSSKDGKLLAATLLLALLSCCLTVVSFYQVAALQGDLASLRAELQGHHAEKLPAGAGAPKAGLEEAPAVTAGLKIFEPPAPGEGNSSQNSRNKRAVQGPEETVTQDCLQLIADSETPTIQKGSYTFVPWLLSFKRGSALEEKENKILVKETGYFFIYGQVLYTDKTYAMGHLIQRKKVHVFGDELSLVTLFRCIQNMPETLPNNSCYSAGIAKLEEGDELQLAIPRENAQISLDGDVTFFGALKLL

SEQ ID NO: 131 - DNA, 2544 bp, Homo sapiens
agatgctgccagggtccctgaagagggaagacacgcggaaacaggtaaaaatcattttgcttttattttgcattcaacaagcaagttattacggaacagcagttatgggccaggcatacctcccagagctgggaacacagtggggacctccctggctctctcttaccggtgttacaacaggttgtagacagacccctgtcttgagcatcctccttgccaggcctgctgagtcttctgagagtagggtaggttattggatgcccaggagggaagaaggagccagggaggtcagccccaaggttctgcaaggccctcaacaggcctggactgaggaggtctggacagcatggccctgtcctgagcctctgtgcataataactgctgtccctaacctccaccccaccctcagccttccaattcccgggcctggggccctactcctgtgctccagagactcctggagctccttgaggcagcacacagtcctgctctggaggcgcccatctcccactcatgctgggatgctccagcccgtcccagagcaggttgtggctggagggtgctggcagaggagggacaatggcccggctcctggaggcaagtgttggctgcagggaacggagtctagtccttgccacagcccttgttaccccttaggtaaccttaaggggatttcaaagaactctggctctgcaaccctgctaagttttttatggaacatgtaaaatagatcccatggccaaagaagtatggacaatgtattatactatactctaatccccatgtctagagattaatggtgtagatagagtttactgaaaggtttttaaagtcctgcaataaagaatcttacttaagccaggtgcggtggctcacgcctgtcatctcagcactttgggaggccaaggcgggaggatcacttgaggtcaggagttcgagaccagcctggccagcatggcgaaaccctgtctctactagaaatacagaaaaattagctgggtgtggtggtgggcacctgtaatcccagctactcgggaggctgaggcaggaggatcacttgaactggggaggtagaggttacagcgagccaagatcgcgccactgcactccagcctgggtgacagagggaaactccatctcaaaaaaacaacaacacaacaacaacaacaataacaacaaaaaaacaaagcaggactggagagaggtggaatgaagtggcaaggggttcctgaggggtgatttgggacaggacatctaaagccaggtgtacgctcacgtcctcagtcccccaggctcctgcacgggctctgttcttttgcagaaaggccttttccacctcatatccagctccctccagaaattcaagagtcccaggaagtcactctgacctgcttgctgaatttctcctgctatgggtatccgatccaattgcagtggctcctagagggggttccaatgaggcaggctgctgtcacctcgacctccttgaccatcaagtctgtcttcacccggagcgagctcaagttctccccacagtggagtcaccatgggaagattgtgacctgccagcttcaggatgcagatgggaagttcctctccaatgacacggtgcagctgaacgtgaagcgtgagtctccccggcatgcctgtgggaagggcaaggtctgtgtcaccttctccccagccccgcagggggcatgcacccagggcagggggaagcctgcacagacggcggcatcctccagccctggtcacgccgccttgtcagccctggtgtttcgggaaaaagatttgctctagcctaacagaataaaatggtccaccctcaagccatgacatgaattggggattatctggttaggtctttttgttcccctcttggtggggatttttttcgcatcattatcttgtgcctcattcattcaataaatacgtatcatgaacctactaggtaccaggccctattacggctgccaatggggggcatggggcggtgggcagggtgcagcagtgagcaaaactcttgccccacgcggagccagcgctgcagtgaaagagacagacaacaaatggattaccaaagaaatacagagcatgagccaagacattagaatctggaacaaagcaatgttaacaaagaaatatacaacactattgtaggtagtgatatgtgtgttaggaaaaaaataaggccgagagaggggagtgatggagagagacctctctaagaaggtgagcacttaggccgggtgcggtggctcacgcctgtaatcctagcactttggaaggccgaggcggggggatcacaaggtcaggagatcgagaccatcctggctaacatggtgaaaccccatctctagtaaaaatacaaaaaattagccaggcatgatggcaggcgcctgtagtcccagctacttgggaggccaaggcaggagaatgacatgaacccaggaggcggagcttgcagtgagctgagatcgcaccactgcactccaacctgggtgacgagtgagactccatctcaaaaaaaaaaaaaaaaaaaaa

SEQ ID NO: 132 - protein, 240 aa, Homo sapiens
MLPGSLKREDTRKQVKIILLLFCIQQASYYGTAVMGQAYLPELGTQWGPPWLSLTGVTTGCRQTPVLSILLARPAESSESRVGYWMPRREEGAREVSPKVLQGPQQAWTEEVWTAWPCPEPLCIITAVPNLHPTLSLPIPGPGALLLCSRDSWSSLRQHTVLLWRRPSPTHAGMLQPVPEQVVAGGCWQRRDNGPAPGGKCWLQGTESSPCHSPCYPLGNLKGISKNSGSATLLSFLWNM

SEQ ID NO: 133 - DNA, 2116 bp, Homo sapiens
acgcggaaacaggcttgcacccagacacgacaccatgcatctcctcggcccctggctcctgctcctggttctagaatacttggctttctctgactcaagtaaatgggtttttgagcaccctgaaaccctctacgcctgggagggggcctgcgtctggatcccctgcacctacagagccctagatggtgacctggaaagcttcatcctgttccacaatcctgagtataacaagaacacctcgaagtttgatgggacaagactctatgaaagcacaaaggatgggaaggttccttctgagcagaaaagggtgcaattcctgggagacaagaataagaactgcacactgagtatccacccggtgcacctcaatgacagtggtcagctggggctgaggatggagtccaagactgagaaatggatggaacgaatacacctcaatgtctctgaaaggccttttccacctcatatccagctccctccagaaattcaagagtcccaggaagtcactctgacctgcttgctgaatttctcctgctatgggtatccgatccaattgcagtggctcctagagggggttccaatgaggcaggctgctgtcacctcgacctccttgaccatcaagtctgtcttcacccggagcgagctcaagttctccccacagtggagtcaccatgggaagattgtgacctgccagcttcaggatgcagatgggaagttcctctccaatgacacggtgcagctgaacgtgaagcatcctcccaagaaggtgaccacagtgattcaaaaccccatgccgattcgagaaggagacacagtgaccctttcctgtaactacaattccagtaaccccagtgttacccggtatgaatggaaaccccatggcgcctgggaggagccatcgcttggggtgctgaagatccaaaacgttggctgggacaacacaaccatcgcctgcgcagcttgtaatagttggtgctcgtgggcctcccctgtcgccctgaatgtccagtatgccccccgagacgtgagggtccggaaaatcaagcccctttccgagattcactctggaaactcggtcagcctccaatgtgacttctcaagcagccaccccaaagaagtccagttcttctgggagaaaaatggcaggcttctggggaaagaaagccagctgaattttgactccatctccccagaagatgctgggagttacagctgctgggtgaacaactccataggacagacagcgtccaaggcctggacacttgaagtgctgtatgcacccaggaggctgcgtgtgtccatgagcccgggggaccaagtgatggaggggaagagtgcaaccctgacctgtgagagcgacgccaaccctcccgtctcccactacacctggtttgactggaataaccaaagcctcccctaccacagccagaagctgagattggagccggtgaaggtccagcactcgggtgcctactggtgccaggggaccaacagtgtgggcaagggccgttcgcctctcagcaccctcaccgtctactatagcccggagaccatcggcaggcgagtggctgtgggactcgggtcctgcctcgccatcctcatcctggcaatctgtgggctcaagctccagcgacgttggaagaggacacagagccagcaggggcttcaggagaattccagcggccagagcttctttgtgaggaataaaaaggttagaagggcccccctctctgaaggcccccactccctgggatgctacaatccaatgatggaagatggcattagctacaccaccctgcgctttcccgagatgaacataccacgaactggagatgcagagtcctcagagatgcagagacctcccccggactgcgatgacacggtcacttattcagcattgcacaagcgccaagtgggcactatgagaacgtcattccagattttccagaagatgaggggattcattactcagagctgatccagtttggggtcggggagcggcctcaggcacaagaaaatgtggactatgtgatcctcaaacattgacactggatgggctgcagcagaggcactgggggcagcgggggccagggaagtccccgagttttccccagac

SEQ ID NO: 134 - protein, 647 aa, Homo sapiens
MHLLGPWLLLLVLEYLAFSDSSKWVFEHPETLYAWEGACVWIPCTYRALDGDLESFILFHNPEYNKNTSKFDGTRLYESTKDGKVPSEQKRVQFLGDKNKNCTLSIHPVHLNDSGQLGLRMESKTEKWMERIHLNVSERPFPPHIQLPPEIQESQEVTLTCLLNFSCYGYPIQLQWLLEGVPMRQAAVTSTSLTIKSVFTRSELKFSPQWSHHGKIVTCQLQDADGKFLSNDTVQLNVKHPPKKVTTVIQNPMPIREGDTVTLSCNYNSSNPSVTRYEWKPHGAWEEPSLGVLKIQNVGWDNTTIACAACNSWCSWASPVALNVQYAPRDVRVRKIKPLSEIHSGNSVSLQCDFSSSHPKEVQFFWEKNGRLLGKESQLNFDSISPEDAGSYSCWVNNSIGQTASKAWTLEVLYAPRRLRVSMSPGDQVMEGKSATLTCESDANPPVSHYTWFDWNNQSLPYHSQKLRLEPVKVQHSGAYWCQGTNSVGKGRSPLSTLTVYYSPETIGRRVAVGLGSCLAILILAICGLKLQRRWKRTQSQQGLQENSSGQSFFVRNKKVRRAPLSEGPHSLGCYNPMMEDGISYTTLRFPEMNIPRTGDAESSEMQRPPPDCDDTVTYSALHKRQVGTMRTSFQIFQKMRGFITQS

SEQ ID NO: 135 - DNA, 1258 bp, Homo sapiens
tccactcacagcctgaagcatacccggcaggggctgtccccaggcccaacaagcaaagggcccagtagcgagggccactggagcccatctccggggggctgggcaggaagtagggtggggtttggggtagggatctggtaccctgggactgctgcaactcaaactaaccaacccactgggagaagatgcctgggggtccaggagtcctccaagctctgcctgccaccatcttcctcctcttcctgctgtctgctgtctacctgggccctgggtgccaggccctgtggatgcacaaggtcccagcatcattgatggtgagcctgggggaagacgcccacttccaatgcccgcacaatagcagcaacaacgccaacgtcacctggtggcgcgtcctccatggcaactacacgtggccccctgagttcttgggcccgggcgaggaccccaatggtacgctgatcatccagaatgtgaacaagagccatgggggcatatacgtgtgccgggtccaggagggcaacgagtcataccagcagtcctgcggcacctacctccgcgtgcgccagccgccccccaggcccttcctggacatgggggagggcaccaagaaccgaatcatcacagccgaggggatcatcctcctgttctgcgcggtggtgcctgggacgctgctgctgttcaggaaacgatggcagaacgagaagctcgggttggatgccggggatgaatatgaagatgaaaacctttatgaaggcctgaacctggacgactgctccatgtatgaggacatctcccggggcctccagggcacctaccaggatgtgggcagcctcaacataggagatgtccagctggagaagccgtgacacccctactcctgccaggctgcccccgcctgctgtgcacccagctccagtgtctcagctcacttccctgggacattctcctttcagcccttctgggggcttccttagtcatattcccccagtggggggtgggagggtaacctcactcttctccaggccaggcctccttggactcccctgggggtgtcccactcttcttccctctaaactgccccacctcctaacctaatccccccgccccgctgcctttcccaggctcccctcaccccagcgggtaatgagcccttaatcgctgcctctaggggagctgattgtagcagcctcgttagtgtcaccccctcctccctgatctgtcagggccacttagtgataataaattcttcccaactgca

SEQ ID NO: 136 - protein, 226 aa, Homo sapiens
MPGGPGVLQALPATIFLLFLLSAVYLGPGCQALWMHKVPASLMVSLGEDAHFQCPHNSSNNANVTWWRVLHGNYTWPPEFLGPGEDPNGTLIIQNVNKSHGGIYVCRVQEGNESYQQSCGTYLRVRQPPPRPFLDMGEGTKNRIITAEGIILLFCAVVPGTLLLFRKRWQNEKLGLDAGDEYEDENLYEGLNLDDCSMYEDISRGLQGTYQDVGSLNIGDVQLEKP

SEQ ID NO: 137 - DNA, 2919 bp, Homo sapiens
aaaaaaaaaaagtgatgagttgtgaggcaggtcgcggccctactgcctcaggagacgatgcgcagctcatttgcttaaatttgcagctgacggctgccacctctctagaggcacctggcggggagcctctcaacataagacagtgaccagtctggtgactcacagccggcacagccatgaactacccgctaacgctggaaatggacctcgagaacctggaggacctgttctgggaactggacagattggacaactataacgacacctccctggtggaaaatcatctctgccctgccacagaggggcccctcatggcctccttcaaggccgtgttcgtgcccgtggcctacagcctcatcttcctcctgggcgtgatcggcaacgtcctggtgctggtgatcctggagcggcaccggcagacacgcagttccacggagaccttcctgttccacctggccgtggccgacctcctgctggtcttcatcttgccctttgccgtggccgagggctctgtgggctgggtcctggggaccttcctctgcaaaactgtgattgccctgcacaaagtcaacttctactgcagcagcctgctcctggcctgcatcgccgtggaccgctacctggccattgtccacgccgtccatgcctaccgccaccgccgcctcctctccatccacatcacctgtgggaccatctggctggtgggcttcctccttgccttgccagagattctcttcgccaaagtcagccaaggccatcacaacaactccctgccacgttgcaccttctcccaagagaaccaagcagaaacgcatgcctggttcacctcccgattcctctaccatgtggcgggattcctgctgcccatgctggtgatgggctggtgctacgtgggggtagtgcacaggttgcgccaggcccagcggcgccctcagcggcagaaggcagtcagggtggccatcctggtgacaagcatcttcttcctctgctggtcaccctaccacatcgtcatcttcctggacaccctggcgaggctgaaggccgtggacaatacctgcaagctgaatggctctctccccgtggccatcaccatgtgtgagttcctgggcctggcccactgctgcctcaaccccatgctctacactttcgccggcgtgaagttccgcagtgacctgtcgcggctcctgacgaagctgggctgtaccggccctgcctccctgtgccagctcttccctagctggcgcaggagcagtctctctgagtcagagaatgccacctctctcaccacgttctaggtcccagtgtccccttttattgctgcttttccttggggcaggcagtgatgctggatgctccttccaacaggagctgggatcctaagggctcaccgtggctaagagtgtcctaggagtatcctcatttggggtagctagaggaaccaacccccatttctagaacatccctgccagctcttctgccggccctggggctaggctggagcccagggagcggaaagcagctcaaaggcacagtgaaggctgtccttacccatctgcacccccctgggctgagagaacctcacgcacctcccatcctaatcatccaatgctcaagaaacaacttctacttctgcccttgccaacggagagcgcctgcccctcccagaacacactccatcagcttaggggctgctgacctccacagcttcccctctctcctcctgcccacctgtcaaacaaagccagaagctgagcaccaggggatgagtggaggttaaggctgaggaaaggccagctggcagcagagtgtggccttcggacaactcagtccctaaaaacacagacattctgccaggcccccaagcctgcagtcatcttgaccaagcaggaagctcagactggttgagttcaggtagctgcccctggctctgaccgaaacagcgctgggtccaccccatgtcaccggatcctgggtggtctgcaggcagggctgactctaggtgcccttggaggccagccagtgacctgaggaagcgtgaaggccgagaagcaagaaagaaacccgacagagggaagaaaagagctttcttcccgaaccccaaggagggagatggatcaatcaaacccggcggtcccctccgccaggcgagatggggtggggtggagaactcctagggtggctgggtccaggggatgggaggttgtgggcattgatggggaaggaggctggcttgtcccctcctcactcccttcccataagctatagacccgaggaaactcagagtcggaacggagaaaggtggactggaaggggcccgtgggagtcatctcaaccatcccctccgtggcatcaccttaggcagggaagtgtaagaaacacactgaggcagggaagtccccaggccccaggaagccgtgccctgcccccgtgaggatgtcactcagatggaaccgcaggaagctgctccgtgcttgtttgctcacctggggtgtgggaggcccgtccggcagttctgggtgctccctaccacctccccagcctttgatcaggtggggagtcagggacccctgcccttgtcccactcaagccaagcagccaagctccttgggaggccccactggggaaataacagctgtggctcacgtgagagtgtcttcacggcaggacaacgaggaagccctaagacgtcccttttttctctgagtatctcctcgcaagctgggtaatcgatgggggagtctgaagcagatgcaaagaggcaagaggctggattttgaattttctttttaataaaaaggcacctataaaacaggtcaatacagtacaggcagcacagagacccccggaacaagcctaaaaattgtttcaaaataaaaaccaagaagatgtcttcacatattgtaaaaaaaaaaaaaaaaa

SEQ ID NO: 138 - protein, 372 aa, Homo sapiens
MNYPLTLEMDLENLEDLFWELDRLDNYNDTSLVENHLCPATEGPLMASFKAVFVPVAYSLIFLLGVIGNVLVLVILERHRQTRSSTETFLFHLAVADLLLVFILPFAVAEGSVGWVLGTFLCKTVIALHKVNFYCSSLLLACIAVDRYLAIVHAVHAYRHRRLLSIHITCGTIWLVGFLLALPEILFAKVSQGHHNNSLPRCTFSQENQAETHAWFTSRFLYHVAGFLLPMLVMGWCYVGVVHRLRQAQRRPQRQKAVRVAILVTSIFFLCWSPYHIVIFLDTLARLKAVDNTCKLNGSLPVAITMCEFLGLAHCCLNPMLYTFAGVKFRSDLSRLLTKLGCTGPASLCQLFPSWRRSSLSESENATSLTTF

SEQ ID NO: 139 - DNA, 1388 bp, Homo sapiens
gatttatactcttaatgggtactttctgactgaattttatgagctcattctgaagaggctgacgattttactatctcatttttttcctttctccagaatgggttctgggtgggtcccctgggtggtggctctgctagtgaatctgacccgactggattcctccatgactcaaggcacagactctccagaagattttgtgattcaggcaaaggctgactgttacttcaccaacgggacagaaaaggtgcagtttgtggtcagattcatctttaacttggaggagtatgtacgtttcgacagtgatgtggggatgtttgtggcattgaccaagctggggcagccagatgctgagcagtggaacagccggctggatctcttggagaggagcagacaggccgtggatggggtctgtagacacaactacaggctgggcgcacccttcactgtggggagaaaagtgcaaccagaggtgacagtgtacccagagaggaccccactcctgcaccagcataatctgctgcactgctctgtgacaggcttctatccaggggatatcaagatcaagtggttcctgaatgggcaggaggagagagctggggtcatgtccactggccctatcaggaatggagactggacctttcagactgtggtgatgctagaaatgactcctgaacttggacatgtctacacctgccttgtcgatcactccagcctgctgagccctgtttctgtggagtggagagctcagtctgaatattcttggagaaagatgctgagtggcattgcagccttcctacttgggctaatcttccttctggtgggaatcgtcatccagctaagggctcagaaaggatatgtgaggacgcagatgtctggtaatgaggtctcaagagctgttctgctccctcagtcatgctaaggtcctcactgaagcttctctctctggagcctgaagtagtgatgagtagtctgggccctgggtgaggtaaaggacattcatgaggtcaatgttctgggaataactctcttccctgatccttggaggagcccgaactgattctggagctctgtgttctgagatcatgcatctcccacccatctgcccttctcccttctacgtgtacatcattaatccccattgccaagggcattgtccagaaactcccctgagaccttactccttccagccccaaatcatttacttttctgtggtccagccctactcctataagtcatgatctccaaagctttctgtcttccaactgcagtctccacagtcttcagaagacaaatgctcaggtagtcactgtttccttttcactgtttttaaaaaccttttattgtcaaataaaatggagatacaaaaaatgtaaaaaaaaaaaaaaaaa

SEQ ID NO: 140 - protein, 273 aa, Homo sapiens
MGSGWVPWVVALLVNLTRLDSSMTQGTDSPEDFVIQAKADCYFTNGTEKVQFVVRFIFNLEEYVRFDSDVGMFVALTKLGQPDAEQWNSRLDLLERSRQAVDGVCRHNYRLGAPFTVGRKVQPEVTVYPERTPLLHQHNLLHCSVTGFYPGDIKIKWFLNGQEERAGVMSTGPIRNGDWTFQTVVMLEMTPELGHVYTCLVDHSSLLSPVSVEWRAQSEYSWRKMLSGIAAFLLGLIFLLVGIVIQLRAQKGYVRTQMSGNEVSRAVLLPQSC

SEQ ID NO: 141 - DNA, 2341 bp, Homo sapiens
tccgcgatcgctgctttcagctgggcaacagcacagggcggtcctgcgcatccggggggctgcgctcccagaccggtggctggggagtaggttgcaggggtgtcactgtgtcaggggaggaggaggaggaggaggaagaagaggtagcggcaaggtcgcggtctgaggttccggtgctcgccgccgcccagctcccagccgaggctttctcaaccgcgtcaataaaaggccgccccgacccgcccccgcgccccgcagccctgccggacaccccgggctgcagctgagcgggcgcagacgggccgaggcgggcgccgggcgcgcagggaccgagggaccgagtgctccccatgagcgcacgtgggccgggcggtccgcaagcccggctgagagcgcgccatggggcaggcgggctgcaaggggctctgcctgtcgctgttcgactacaagaccgagaagtatgtcatcgccaagaacaagaaggtgggcctgctgtaccggctgctgcaggcctccatcctggcgtacctggtcgtatgggtgttcctgataaagaagggttaccaagacgtcgacacctccctgcagagtgctgtcatcaccaaagtcaagggcgtggccttcaccaacacctcggatcttgggcagcggatctgggatgtcgccgactacgtcattccagcccagggagagaacgtcttttttgtggtcaccaacctgattgtgacccccaaccagcggcagaacgtctgtgctgagaatgaaggcattcctgatggcgcgtgctccaaggacagcgactgccacgctggggaagcggttacagctggaaacggagtgaagaccggccgctgcctgcggagagagaacttggccaggggcacctgtgagatctttgcctggtgcccgttggagacaagctccaggccggaggagccattcctgaaggaggccgaagacttcaccattttcataaagaaccacatccgtttccccaaattcaacttctccaaaagcaatgtgatggacgtcaaggacagatctttcctgaaatcatgccactttggccccaagaaccactactgccccatcttccgactgggctccgtgatccgctgggccgggagcgacttccaggatatagccctggagggtggcgtgataggaattaatattgaatggaactgtgatcttgataaagctgcctctgagtgccaccctcactattcttttagccgtctggacaataaactttcaaagtctgtctcctccgggtacaacttcagatttgccagatattaccgagacgcagccggggtggagttccgcaccctgatgaaagcctacgggatccgctttgacgtgatggtgaacggcaagggtgctttcttctgcgacctggtactcatctacctcatcaaaaagagagagttttaccgtgacaagaagtacgaggaagtgaggggcctagaagacagttcccaggaggccgaggacgaggcatcggggctggggctatctgagcagctcacatctgggccagggctgctggggatgccggagcagcaggagctgcaggagccacccgaggcgaagcgtggaagcagcagtcagaaggggaacggatctgtgtgcccacagctcctggagccccacaggagcacgtgaattgcctctgcttacgttcaggccctgtcctaaacccagccgtctagcacccagtgatcccatgcctttgggaatcccaggatgctgcccaacgggaaatttgtacattgggtgctatcaatgccacatcacagggaccagccatcacagagcaaagtgacctccacgtctgatgctggggtcatcaggacggacccatcatggctgtctttttgccccaccccctgccgtcagttcttcctttctccgtggctggcttcccgcactagggaacgggttgtaaatggggaacatgacttccttccggagtccttgagcacctcagctaaggaccgcagtgccctgtagagttcctagattacctcactgggaatagcattgtgcgtgtccggaaaagggctccatttggttccagcccactcccctctgcaagtgccgcagcttccctcagagcatactctccagtggatccaagtactctctctcctaaagacaccaccttcctgccagctgtttgcccttaggccagtacacagaattaaagtgggggagatggcagacgctttctgggacctgcccaagatatgtattctctgacactcttatttggtcataaaacaataaatggtgtcaatttcaaaaaaaaaaaaaaaaaaaaaaaaaaaaaaaaaaa

SEQ ID NO: 142 - protein, 422 aa, Homo sapiens
MGQAGCKGLCLSLFDYKTEKYVIAKNKKVGLLYRLLQASILAYLVVWVFLIKKGYQDVDTSLQSAVITKVKGVAFTNTSDLGQRIWDVADYVIPAQGENVFFVVTNLIVTPNQRQNVCAENEGIPDGACSKDSDCHAGEAVTAGNGVKTGRCLRRENLARGTCEIFAWCPLETSSRPEEPFLKEAEDFTIFIKNHIRFPKFNFSKSNVMDVKDRSFLKSCHFGPKNHYCPIFRLGSVIRWAGSDFQDIALEGGVIGINIEWNCDLDKAASECHPHYSFSRLDNKLSKSVSSGYNFRFARYYRDAAGVEFRTLMKAYGIRFDVMVNGKGAFFCDLVLIYLIKKREFYRDKKYEEVRGLEDSSQEAEDEASGLGLSEQLTSGPGLLGMPEQQELQEPPEAKRGSSSQKGNGSVCPQLLEPHRST

SEQ ID NO: 143 - DNA, 1548 bp, Homo sapiens
aattgctaagccgtgcagtcacagagggaacacagagcctagttgtaaacggacagagacgagaggggcaagggaggacagtggatgacagggaagacgagtgggggcagagctgctcaggaccatggctgaggccatcacctatgcagatctgaggtttgtgaaggctcccctgaagaagagcatctccagccggttaggacaggacccaggggctgatgatgatggggaaatcacctacgagaatgttcaagtgcccgcagtcctaggggtgccctcaagcttggcttcttctgtactaggggacaaagcagcggtcaagtcggagcagccaactgcgtcctggagagccgtgacgtcaccagctgtcgggcggattctcccctgccgcacaacctgcctgcgatacctcctgctcggcctgctcctcacctgcctgctgttaggagtgaccgccatctgcctgggagtgcgctatctgcaggtgtctcagcagctccagcagacgaacagggttctggaagtcactaacagcagcctgaggcagcagctccgcctcaagataacgcagctgggacagagtgcagaggatctgcaggggtccaggagagagctggcgcagagtcaggaagcactacaggtggaacagagggctcatcaggcggccgaagggcagctacaggcctgccaggcagacagacagaagacgaaggagaccttgcaaagtgaggagcaacagaggagggccttggagcagaagctgagcaacatggagaacagactgaagcccttcttcacatgcggctcagcagacacctgctgtccgtcgggatggataatgcatcagaaaagctgcttttacatctcacttacttcaaaaaattggcaggagagccaaaaacaatgtgaaactctgtcttccaagctggccacattcagtgaaatttatccacaatcacactcttactacttcttaaattcactgttgccaaatggtggttcagggaattcatattggactggcctcagctctaacaaggattggaagttgactgatgatacacaacgcactaggacttatgctcaaagctcaaaatgtaacaaggtacataaaacttggtcatggtggacactggagtcagagtcatgtagaagttctcttccctacatctgtgagatgacagctttcaggtttccagattaggacagtcctttgcactgagttgacactcatgccaacaagaacctgtgcccctccttcctaacctgaggcctggggttcctcagaccatctccttcattctgggcagtgcccagccaccggctgacccacacctgacacttccagccagtctgctgcctgctccctcttcctgaaactggactgttcctgggaaaagggtgaagccacctctagaagggactttggcctccccccaagaacttcccatggtagaatggggtgggggaggagggcgcacgggctgagcggataggggcggcccggagccagccaggcagttttattgaaatctttttaaataattg

SEQ ID NO: 144 - protein, 359 aa, Homo sapiens
MAEAITYADLRFVKAPLKKSISSRLGQDPGADDDGEITYENVQVPAVLGVPSSLASSVLGDKAAVKSEQPTASWRAVTSPAVGRILPCRTTCLRYLLLGLLLTCLLLGVTAICLGVRYLQVSQQLQQTNRVLEVTNSSLRQQLRLKITQLGQSAEDLQGSRRELAQSQEALQVEQRAHQAAEGQLQACQADRQKTKETLQSEEQQRRALEQKLSNMENRLKPFFTCGSADTCCPSGWIMHQKSCFYISLTSKNWQESQKQCETLSSKLATFSEIYPQSHSYYFLNSLLPNGGSGNSYWTGLSSNKDWKLTDDTQRTRTYAQSSKCNKVHKTWSWWTLESESCRSSLPYICEMTAFRFPD

SEQ ID NO: 145 - DNA, 2725 bp, Homo sapiens
agaatgctgagcagtcaacagcatttcttgttccaagatcacccttctgagtacctctctggctgccaaattgccagggccttcacagtttgattccatttctcagctccaagcattaggtaaacccaccaagcaatcctagcctgtgatggcgtttgacgtcagctgcttcttttgggtggtgctgttttctgccggctgtaaagtcatcacctcctgggatcagatgtgcattgagaaagaagccaacaaaacatataactgtgaaaatttaggtctcagtgaaatccctgacactctaccaaacacaacagaatttttggaattcagctttaattttttgcctacaattcacaatagaaccttcagcagactcatgaatcttacctttttggatttaactaggtgccagattaactggatacatgaagacacttttcaaagccatcatcaattaagcacacttgtgttaactggaaatcccctgatattcatggcagaaacatcgcttaatgggcccaagtcactgaagcatcttttcttaatccaaacgggaatatccaatctcgagtttattccagtgcacaatctggaaaacttggaaagcttgtatcttggaagcaaccatatttcctccattaagttccccaaagacttcccagcacggaatctgaaagtactggattttcagaataatgctatacactacatctctagagaagacatgaggtctctggagcaggccatcaacctaagcctgaacttcaatggcaataatgttaaaggtattgagcttggggcttttgattcaacgatcttccaaagtttgaactttggaggaactccaaatttgtctgttatattcaatggtctgcagaactctactactcagtctctctggctgggaacatttgaggacattgatgacgaagatattagttcagccatgctcaagggactctgtgaaatgtctgttgagagcctcaacctgcaggaacaccgcttctctgacatctcatccaccacatttcagtgcttcacccaactccaagaattggatctgacagcaactcacttgaaagggttaccctctgggatgaagggtctgaacttgctcaagaaattagttctcagtgtaaatcatttcgatcaattgtgtcaaatcagtgctgccaatttcccctcccttacacacctctacatcagaggcaacgtgaagaaacttcaccttggtgttggctgcttggagaaactaggaaaccttcagacacttgatttaagccataatgacatagaggcttctgactgctgcagtctgcaactcaaaaacctgtcccacttgcaaaccttaaacctgagccacaatgagcctcttggtctccagagtcaggcattcaaagaatgtcctcagctagaactcctcgatttggcatttacccgcttacacattaatgctccacaaagtcccttccaaaacctccatttccttcaggttctgaatctcacttactgcttccttgataccagcaatcagcatcttctagcaggcctaccagttctccggcatctcaacttaaaagggaatcactttcaagatgggactatcacgaagaccaacctacttcagaccgtgggcagcttggaggttctgattttgtcctcttgtggtctcctctctatagaccagcaagcattccacagcttgggaaaaatgagccatgtagacttaagccacaacagcctgacatgcgacagcattgattctcttagccatcttaagggaatctacctcaatctggctgccaacagcattaacatcatctcaccccgtctcctccctatcttgtcccagcagagcaccattaatttaagtcataaccccctggactgcacttgctcgaatattcatttcttaacatggtacaaagaaaacctgcacaaacttgaaggctcggaggagaccacgtgtgcaaacccgccatctctaaggggagttaagctatctgatgtcaagctttcctgtgggattacagccataggcattttctttctcatagtatttctattattgttggctattctgctattttttgcagttaaataccttctcaggtggaaataccaacacatttagtgctgaaggtttccagagaaagcaaataagtgtgcttagcaaaattgctctaagtgaaagaactgtcatctgctggtgaccagaccagacttttcagattgcttcctggaactgggcagggactcactgtgcttttctgagcttcttactcctgtgagtcccagagctaaagaaccttctaggcaagtacaccgaatgactcagtccagagggtcagatgctgctgtgagaggcacagagccctttccgcatgtggaagagtgggaggaagcagagggagggactgggcagggactgccggccccggagtctcccacagggaggccattccccttctactcaccgacatccctcccagcaccacacaccccgcccctgaaaggagatcatcagcccccacaatttgtcagagctgaagccagcccactacccacccccactacagcattgtgcttgggtctgggttctcagtaatgtagccatttgagaaacttacttggggacaaagtctcaatccttattttaaatgaaaaaagaaaagaaaagcataataaatttaaaagaaaaggctgagaaatgaaaaaaaaaaaa

SEQ ID NO: 146 - protein, 661 aa, Homo sapiens
MAFDVSCFFWVVLFSAGCKVITSWDQMCIEKEANKTYNCENLGLSEIPDTLPNTTEFLEFSFNFLPTIHNRTFSRLMNLTFLDLTRCQINWIHEDTFQSHHQLSTLVLTGNPLIFMAETSLNGPKSLKHLFLIQTGISNLEFIPVHNLENLESLYLGSNHISSIKFPKDFPARNLKVLDFQNNAIHYISREDMRSLEQAINLSLNFNGNNVKGIELGAFDSTIFQSLNFGGTPNLSVIFNGLQNSTTQSLWLGTFEDIDDEDISSAMLKGLCEMSVESLNLQEHRFSDISSTTFQCFTQLQELDLTATHLKGLPSGMKGLNLLKKLVLSVNHFDQLCQISAANFPSLTHLYIRGNVKKLHLGVGCLEKLGNLQTLDLSHNDIEASDCCSLQLKNLSHLQTLNLSHNEPLGLQSQAFKECPQLELLDLAFTRLHINAPQSPFQNLHFLQVLNLTYCFLDTSNQHLLAGLPVLRHLNLKGNHFQDGTITKTNLLQTVGSLEVLILSSCGLLSIDQQAFHSLGKMSHVDLSHNSLTCDSIDSLSHLKGIYLNLAANSINIISPRLLPILSQQSTINLSHNPLDCTCSNIHFLTWYKENLHKLEGSEETTCANPPSLRGVKLSDVKLSCGITAIGIFFLIVFLLLLAILLFFAVKYLLRWKYQHI

SEQ ID NO: 147 - DNA, 3116 bp, Homo sapiens
aacttccgatatcaacttcctcaaacctctgatgagctgctgctgctcgactctgaggtgcattctttttttgatgagaggcatctctaggtaccatccctgacctggtcctcatgctgccgaggctgttgctgttgatctgtgctccactctgtgaacctgccgagctgtttttgatagccagcccctcccatcccacagaggggagcccagtgaccctgacgtgtaagatgccctttctacagagttcagatgcccagttccagttctgctttttcagagacacccgggccttgggcccaggctggagcagctcccccaagctccagatcgctgccatgtggaaagaagacacagggtcatactggtgcgaggcacagacaatggcgtccaaagtcttgaggagcaggagatcccagataaatgtgcacagggtccctgtcgctgatgtgagcttggagactcagcccccaggaggacaggtgatggagggagacaggctggtcctcatctgctcagttgctatgggcacaggagacatcaccttcctttggtacaaaggggctgtaggtttaaaccttcagtcaaagacccagcgttcactgacagcagagtatgagattccttcagtgagggagagtgatgctgagcaatattactgtgtagctgaaaatggctatggtcccagccccagtgggctggtgagcatcactgtcagaatcccggtgtctcgcccaatcctcatgctcagggctcccagggcccaggctgcagtggaggatgtgctggagcttcactgtgaggccctgagaggctctcctccgatcctgtactggttttatcacgaggatatcaccctggggagcaggtcggccccctctggaggaggagcctccttcaacctttccctgactgaagaacattctggaaactactcctgtgaggccaacaatggcctgggggcccagcgcagtgaggcggtgacactcaacttcacagtgcctactggggccagaagcaatcatcttacctcaggagtcattgaggggctgctcagcacccttggtccagccaccgtggccttattattttgctacggcctcaaaagaaaaataggaagacgttcagccagggatccactcaggagccttcccagccctctaccccaagagttcacctacctcaactcacctaccccagggcagctacagcctatatatgaaaatgtgaatgttgtaagtggggatgaggtttattcactggcgtactataaccagccggagcaggaatcagtagcagcagaaaccctggggacacatatggaggacaaggtttccttagacatctattccaggctgaggaaagcaaacattacagatgtggactatgaagatgctatgtaaggttatggaagattctgctctttgaaaaccatccatgaccccaagcctcaggcctgatatgttcttcagagatcctggggcattagctttccagtatacctcttctggatgccattctccatggcactattccttcatctactgtgaagtgaagttggcgcagccctgaagaaactacctaggagaactaatagacacaggagtgacagggactttgttatcagaaccagattcctgccggctcctttgaaaacaggtcatattgtgctcttctgtttacaagaggaaacaagatggaataaaagaaattgggatcttgggttggagggacagtgaagcttagagcacatgaactcaaggttagtgactctgcaggacttcacagagagagctgtgcccatcattcagtccaagtgctttctctgcccagacagcacagaactccagccccgctacttacatggatcatcgagtttccacctaaaatatgattctatttattttgagtcactgttaccaaattagaactaaaacaaagttacataaaaagttattgtgactccacttaattttagtgacgtatttttgtatatataggccaacctataccacatccaaaattatgtatctattacagcccctagaagctttataaatacagtgtgtcttcttttattcacaaaatttttgaaatcgtggtaatatggtttgaaacctgtatcttaattattttttttttaaattgagacagggtctcactctgtcactcaatctggaatgcagtggcacaatcttgcctcactgcaacgcctgcctctcaggctcaagcaaacctctcacctcagcctgctgagtagctgggactacaggcacatgccaccaaacttggccattttttgtcttacgtagagacaagatttcaccgttttgcccaggctggtctcaaactcctgggctcaagcaatgtattgaattttaaaataaccaggcactcactcttatgaattaataaacatttggaggtatataaagtaaaaagttaaagtctttcctgtaagttaacacaaatgttaactattgttaaaaactttacaggtagctctctagatatttttctatttttgtatgtatacttatgcatacatgtaagtatataaacatttagaagtgtacctatctaacaaactattatgaaatactttcaaatctgtaaatagatctattatactattttaaaagtctctatagtagtgtgttatatagataaatcataacttttttctttttttattgtagtaaatatgcacaacataaaattgatcattttaaccatttttaagtgtacaattcagtggcattaagtactatcataatatattttaatccttctcatcactggtggacattaaggagactctcaaaaaattcatattataaaaacaaagttcaaacaaatgtctttgtactagcatattatggcactcctgctggattatctgaaggataaatttgtaaatctagtattgctagattatgcatattaaatattcttgttaaatagtcttcaatgtctctcaggtaaggctgtatcaatttatatcttcaccaacaacgtctgggaaatcagtttgtggggtgtattacttagttttcacattgctaataaagacatatccaagactgggtaatttataaaaaaaaaaaaaaaaaaaa

SEQ ID NO: 148 - protein, 429 aa, Homo sapiens
MLPRLLLLICAPLCEPAELFLIASPSHPTEGSPVTLTCKMPFLQSSDAQFQFCFFRDTRALGPGWSSSPKLQIAAMWKEDTGSYWCEAQTMASKVLRSRRSQINVHRVPVADVSLETQPPGGQVMEGDRLVLICSVAMGTGDITFLWYKGAVGLNLQSKTQRSLTAEYEIPSVRESDAEQYYCVAENGYGPSPSGLVSITVRIPVSRPILMLRAPRAQAAVEDVLELHCEALRGSPPILYWFYHEDITLGSRSAPSGGGASFNLSLTEEHSGNYSCEANNGLGAQRSEAVTLNFTVPTGARSNHLTSGVIEGLLSTLGPATVALLFCYGLKRKIGRRSARDPLRSLPSPLPQEFTYLNSPTPGQLQPIYENVNVVSGDEVYSLAYYNQPEQESVAAETLGTHMEDKVSLDIYSRLRKANITDVDYEDAM

SEQ ID NO: 149 - DNA, 2797 bp, Homo sapiens
gtgcagtgtcctgactgtaagatcaagtccaaacctgttttggaattgaggaaacttctcttttgatctcagcccttggtggtccaggtcttcatgctgctgtgggtgatattactggtcctggctcctgtcagtggacagtttgcaaggacacccaggcccattattttcctccagcctccatggaccacagtcttccaaggagagagagtgaccctcacttgcaagggatttcgcttctactcaccacagaaaacaaaatggtaccatcggtaccttgggaaagaaatactaagagaaaccccagacaatatccttgaggttcaggaatctggagagtacagatgccaggcccagggctcccctctcagtagccctgtgcacttggatttttcttcagcttcgctgatcctgcaagctccactttctgtgtttgaaggagactctgtggttctgaggtgccgggcaaaggcggaagtaacactgaataatactatttacaagaatgataatgtcctggcattccttaataaaagaactgacttccatattcctcatgcatgtctcaaggacaatggtgcatatcgctgtactggatataaggaaagttgttgccctgtttcttccaatacagtcaaaatccaagtccaagagccatttacacgtccagtgctgagagccagctccttccagcccatcagcgggaacccagtgaccctgacctgtgagacccagctctctctagagaggtcagatgtcccgctccggttccgcttcttcagagatgaccagaccctgggattaggctggagtctctccccgaatttccagattactgccatgtggagtaaagattcagggttctactggtgtaaggcagcaacaatgcctcacagcgtcatatctgacagcccgagatcctggatacaggtgcagatccctgcatctcatcctgtcctcactctcagccctgaaaaggctctgaattttgagggaaccaaggtgacacttcactgtgaaacccaggaagattctctgcgcactttgtacaggttttatcatgagggtgtccccctgaggcacaagtcagtccgctgtgaaaggggagcatccatcagcttctcactgactacagagaattcagggaactactactgcacagctgacaatggccttggcgccaagcccagtaaggctgtgagcctctcagtcactgttcccgtgtctcatcctgtcctcaacctcagctctcctgaggacctgatttttgagggagccaaggtgacacttcactgtgaagcccagagaggttcactccccatcctgtaccagtttcatcatgaggatgctgccctggagcgtaggtcggccaactctgcaggaggagtggccatcagcttctctctgactgcagagcattcagggaactactactgcacagctgacaatggctttggcccccagcgcagtaaggcggtgagcctctccatcactgtccctgtgtctcatcctgtcctcaccctcagctctgctgaggccctgacttttgaaggagccactgtgacacttcactgtgaagtccagagaggttccccacaaatcctataccagttttatcatgaggacatgcccctgtggagcagctcaacaccctctgtgggaagagtgtccttcagcttctctctgactgaaggacattcagggaattactactgcacagctgacaatggctttggtccccagcgcagtgaagtggtgagcctttttgtcactgttccagtgtctcgccccatcctcaccctcagggttcccagggcccaggctgtggtgggggacctgctggagcttcactgtgaggccccgagaggctctcccccaatcctgtactggttttatcatgaggatgtcaccctggggagcagctcagccccctctggaggagaagcttctttcaacctctctctgactgcagaacattctggaaactactcatgtgaggccaacaatggcctagtggcccagcacagtgacacaatatcactcagtgttatagttccagtatctcgtcccatcctcaccttcagggctcccagggcccaggctgtggtgggggacctgctggagcttcactgtgaggccctgagaggctcctccccaatcctgtactggttttatcatgaagatgtcaccctgggtaagatctcagccccctctggaggaggggcctccttcaacctctctctgactacagaacattctggaatctactcctgtgaggcagacaatggtctggaggcccagcgcagtgagatggtgacactgaaagttgcaggtgagtgggccctgcccaccagcagcacatctgagaactgactgtgcctgttctccctgcagctgaaaatggagccacagagctcctcagggctgtttgcttgtgtggcatcccagcacacttcctgcctgcagaacctccctgtgaaagtctcggatcctttgtggtatggttccaggaatctgatgtttcccagcagtcttcttgaagatgatcaaagcacctcactaaaaatgcaaataagacttttttagaacataaactatattctgaactgaaattattacatgaaaatgaaaccaaagaattctgagcatatgtttctctgccgtagaaaggattaagctgtttcttgtccggattcttctctcattgacttctaagaagcctctactcttgagtctctttcattactggggatgtaaatgttccttacatttccacattaaaaatcctatgttaacg

SEQ ID NO: 150 - protein, 759 aa, Homo sapiens
MLLWVILLVLAPVSGQFARTPRPIIFLQPPWTTVFQGERVTLTCKGFRFYSPQKTKWYHRYLGKEILRETPDNILEVQESGEYRCQAQGSPLSSPVHLDFSSASLILQAPLSVFEGDSVVLRCRAKAEVTLNNTIYKNDNVLAFLNKRTDFHIPHACLKDNGAYRCTGYKESCCPVSSNTVKIQVQEPFTRPVLRASSFQPISGNPVTLTCETQLSLERSDVPLRFRFFRDDQTLGLGWSLSPNFQITAMWSKDSGFYWCKAATMPHSVISDSPRSWIQVQIPASHPVLTLSPEKALNFEGTKVTLHCETQEDSLRTLYRFYHEGVPLRHKSVRCERGASISFSLTTENSGNYYCTADNGLGAKPSKAVSLSVTVPVSHPVLNLSSPEDLIFEGAKVTLHCEAQRGSLPILYQFHHEDAALERRSANSAGGVAISFSLTAEHSGNYYCTADNGFGPQRSKAVSLSITVPVSHPVLTLSSAEALTFEGATVTLHCEVQRGSPQILYQFYHEDMPLWSSSTPSVGRVSFSFSLTEGHSGNYYCTADNGFGPQRSEVVSLFVTVPVSRPILTLRVPRAQAVVGDLLELHCEAPRGSPPILYWFYHEDVTLGSSSAPSGGEASFNLSLTAEHSGNYSCEANNGLVAQHSDTISLSVIVPVSRPILTFRAPRAQAVVGDLLELHCEALRGSSPILYWFYHEDVTLGKISAPSGGGASFNLSLTTEHSGIYSCEADNGLEAQRSEMVTLKVAGEWALPTSSTSEN

SEQ ID NO: 151 - DNA, 1814 bp, Homo sapiens
gcagagctcgagaggcggctgccgggctgcggggcgccttgactctccctccaccctgcctcctcgggctccactcgtctgcccctggactcccgtctcctcctgtcctccggcttcccagagctccctccttatggcagcagcttcccgcgtctccggcgcagcttctcagcggacgaccctctcgctccggggctgagcccagtccctggatgttgctgaaactctcgagatcatgcgcgggtttggctgctgcttccccgccgggtgccactgccaccgccgccgcctctgctgccgccgtccgcgggatgctcagtagcccgctgcccggcccccgcgatcctgtgttcctcggaagccgtttgctgctgcagagttgcacgaactagtcatggtgctgtgggagtccccgcggcagtgcagcagctggacactttgcgagggcttttgctggctgctgctgctgcccgtcatgctactcatcgtagcccgcccggtgaagctcgctgctttccctacctccttaagtgactgccaaacgcccaccggctggaattgctctggttatgatgacagagaaaatgatctcttcctctgtgacaccaacacctgtaaatttgatggggaatgtttaagaattggagacactgtgacttgcgtctgtcagttcaagtgcaacaatgactatgtgcctgtgtgtggctccaatggggagagctaccagaatgagtgttacctgcgacaggctgcatgcaaacagcagagtgagatacttgtggtgtcagaaggatcatgtgccacagatgcaggatcaggatctggagatggagtccatgaaggctctggagaaactagtcaaaaggagacatccacctgtgatatttgccagtttggtgcagaatgtgacgaagatgccgaggatgtctggtgtgtgtgtaatattgactgttctcaaaccaacttcaatcccctctgcgcttctgatgggaaatcttatgataatgcatgccaaatcaaagaagcatcgtgtcagaaacaggagaaaattgaagtcatgtctttgggtcgatgtcaagataacacaactacaactactaagtctgaagatgggcattatgcaagaacagattatgcagagaatgctaacaaattagaagaaagtgccagagaacaccacataccttgtccggaacattacaatggcttctgcatgcatgggaagtgtgagcattctatcaatatgcaggagccatcttgcaggtgtgatgctggttatactggacaacactgtgaaaaaaaggactacagtgttctatacgttgttcccggtcctgtacgatttcagtatgtcttaatcgcagctgtgattggaacaattcagattgctgtcatctgtgtggtggtcctctgcatcacaaggaaatgccccagaagcaacagaattcacagacagaagcaaaatacagggcactacagttcagacaatacaacaagagcgtccacgaggttaatctaaagggagcatgtttcacagtggctggactaccgagagcttggactacacaatacagtattatagacaaaagaataagacaagagatctacacatgttgccttgcatttgtggtaatctacaccaatgaaaacatgtactacagctatatttgattatgtatggatatatttgaaatagtatacattgtcttgatgttttttctgtaatgtaaataaactatttatatcacacaatatagttttttctttcccatgtatttgttatatataataaatactcagtgatgagaaaaaaa

SEQ ID NO: 152 - protein, 374 aa, Homo sapiens
MVLWESPRQCSSWTLCEGFCWLLLLPVMLLIVARPVKLAAFPTSLSDCQTPTGWNCSGYDDRENDLFLCDTNTCKFDGECLRIGDTVTCVCQFKCNNDYVPVCGSNGESYQNECYLRQAACKQQSEILVVSEGSCATDAGSGSGDGVHEGSGETSQKETSTCDICQFGAECDEDAEDVWCVCNIDCSQTNFNPLCASDGKSYDNACQIKEASCQKQEKIEVMSLGRCQDNTTTTTKSEDGHYARTDYAENANKLEESAREHHIPCPEHYNGFCMHGKCEHSINMQEPSCRCDAGYTGQHCEKKDYSVLYVVPGPVRFQYVLIAAVIGTIQIAVICVVVLCITRKCPRSNRIHRQKQNTGHYSSDNTTRASTRLI

SEQ ID NO: 153 - DNA, 2653 bp, Homo sapiens
ctcaaaaggggccggatttccttctcctggaggcagatgttgcctctctctctcgctcggattggttcagtgcactctagaaacactgctgtggtggagaaactggaccccaggtctggagcgaattccagcctgcagggctgataagcgaggcattagtgagattgagagagactttaccccgccgtggtggttggagggcgcgcagtagagcagcagcacaggcgcgggtcccgggaggccggctctgctcgcgccgagatgtggaatctccttcacgaaaccgactcggctgtggccaccgcgcgccgcccgcgctggctgtgcgctggggcgctggtgctggcgggtggcttctttctcctcggcttcctcttcgggtggtttataaaatcctccaatgaagctactaacattactccaaagcataatatgaaagcatttttggatgaattgaaagctgagaacatcaagaagttcttatataattttacacagataccacatttagcaggaacagaacaaaactttcagcttgcaaagcaaattcaatcccagtggaaagaatttggcctggattctgttgagctagcacattatgatgtcctgttgtcctacccaaataagactcatcccaactacatctcaataattaatgaagatggaaatgagattttcaacacatcattatttgaaccacctcctccaggatatgaaaatgtttcggatattgtaccacctttcagtgctttctctcctcaaggaatgccagagggcgatctagtgtatgttaactatgcacgaactgaagacttctttaaattggaacgggacatgaaaatcaattgctctgggaaaattgtaattgccagatatgggaaagttttcagaggaaataaggttaaaaatgcccagctggcaggggccaaaggagtcattctctactccgaccctgctgactactttgctcctggggtgaagtcctatccagatggttggaatcttcctggaggtggtgtccagcgtggaaatatcctaaatctgaatggtgcaggagaccctctcacaccaggttacccagcaaatgaatatgcttataggcgtggaattgcagaggctgttggtcttccaagtattcctgttcatccaattggatactatgatgcacagaagctcctagaaaaaatgggtggctcagcaccaccagatagcagctggagaggaagtctcaaagtgccctacaatgttggacctggctttactggaaacttttctacacaaaaagtcaagatgcacatccactctaccaatgaagtgacaagaatttacaatgtgataggtactctcagaggagcagtggaaccagacagatatgtcattctgggaggtcaccgggactcatgggtgtttggtggtattgaccctcagagtggagcagctgttgttcatgaaattgtgaggagctttggaacactgaaaaaggaagggtggagacctagaagaacaattttgtttgcaagctgggatgcagaagaatttggtcttcttggttctactgagtgggcagaggagaattcaagactccttcaagagcgtggcgtggcttatattaatgctgactcatctatagaaggaaactacactctgagagttgattgtacaccgctgatgtacagcttggtacacaacctaacaaaagagctgaaaagccctgatgaaggctttgaaggcaaatctctttatgaaagttggactaaaaaaagtccttccccagagttcagtggcatgcccaggataagcaaattgggatctggaaatgattttgaggtgttcttccaacgacttggaattgcttcaggcagagcacggtatactaaaaattgggaaacaaacaaattcagcggctatccactgtatcacagtgtctatgaaacatatgagttggtggaaaagttttatgatccaatgtttaaatatcacctcactgtggcccaggttcgaggagggatggtgtttgagctagccaattccatagtgctcccttttgattgtcgagattatgctgtagttttaagaaagtatgctgacaaaatctacagtatttctatgaaacatccacaggaaatgaagacatacagtgtatcatttgattcacttttttctgcagtaaagaattttacagaaattgcttccaagttcagtgagagactccaggactttgacaaaagcaacccaatagtattaagaatgatgaatgatcaactcatgtttctggaaagagcatttattgatccattagggttaccagacaggcctttttataggcatgtcatctatgctccaagcagccacaacaagtatgcaggggagtcattcccaggaatttatgatgctctgtttgatattgaaagcaaagtggacccttccaaggcctggggagaagtgaagagacagatttatgttgcagccttcacagtgcaggcagctgcagagactttgagtgaagtagcctaagaggattctttagagaatccgtattgaatttgtgtggtatgtcactcagaaagaatcgtaatgggtatattgataaattttaaaattggtatatttgaaataaagttgaatattatatataaaaaaaaaaaaaaaaaaa

SEQ ID NO: 154 - protein, 750 aa, Homo sapiens
MWNLLHETDSAVATARRPRWLCAGALVLAGGFFLLGFLFGWFIKSSNEATNITPKHNMKAFLDELKAENIKKFLYNFTQIPHLAGTEQNFQLAKQIQSQWKEFGLDSVELAHYDVLLSYPNKTHPNYISIINEDGNEIFNTSLFEPPPPGYENVSDIVPPFSAFSPQGMPEGDLVYVNYARTEDFFKLERDMKINCSGKIVIARYGKVFRGNKVKNAQLAGAKGVILYSDPADYFAPGVKSYPDGWNLPGGGVQRGNILNLNGAGDPLTPGYPANEYAYRRGIAEAVGLPSIPVHPIGYYDAQKLLEKMGGSAPPDSSWRGSLKVPYNVGPGFTGNFSTQKVKMHIHSTNEVTRIYNVIGTLRGAVEPDRYVILGGHRDSWVFGGIDPQSGAAVVHEIVRSFGTLKKEGWRPRRTILFASWDAEEFGLLGSTEWAEENSRLLQERGVAYINADSSIEGNYTLRVDCTPLMYSLVHNLTKELKSPDEGFEGKSLYESWTKKSPSPEFSGMPRISKLGSGNDFEVFFQRLGIASGRARYTKNWETNKFSGYPLYHSVYETYELVEKFYDPMFKYHLTVAQVRGGMVFELANSIVLPFDCRDYAVVLRKYADKIYSISMKHPQEMKTYSVSFDSLFSAVKNFTEIASKFSERLQDFDKSNPIVLRMMNDQLMFLERAFIDPLGLPDRPFYRHVIYAPSSHNKYAGESFPGIYDALFDIESKVDPSKAWGEVKRQIYVAAFTVQAAAETLSEVA

SEQ ID NO: 155 - DNA, 2996 bp, Homo sapiens
cgcagccacccatgcgcgcgcgctcgcaagaccaccagcgcccagagccccagtctgaggcttggcgccgggggtctgcgggcgaggggagctctctacgtgcgaggggctagcgggagccggcacaagagggtcgaggagccaggaaccccaaacgtccggcgccaggcgctagccaagctgctgcgcgccccggcgcccagctggctcggggacagccgctgggtgtcggagaccggagctagcggattgcagcggaaaagcaaagatgtcacactggatccttggcctccagggtccattaaggtgagaataagatctctgggctggctggaactagcctaagactgaaaagcagccatggacatggcggatgagccactcaatggaagccacacatggctatccattccatttgacctcaatggctctgtggtgtcaaccaacacctcaaaccagacagagccgtactatgacctgacaagcaatgcagtcctcacattcatctattttgtggtctgcatcattgggttgtgtggcaacacacttgtcatttatgtcatcctccgctatgccaagatgaagaccatcaccaacatttacatcctcaacctggccatcgcagatgagctcttcatgctgggtctgcctttcttggctatgcaggtggctctggtccactggccctttggcaaggccatttgccgggtggtcatgactgtggatggcatcaatcagttcaccagcatcttctgcctgacagtcatgagcatcgaccgatacctggctgtggtccaccccatcaagtcggccaagtggaggagaccccggacggccaagatgatcaccatggctgtgtggggagtctctctgctggtcatcttgcccatcatgatatatgctgggctccggagcaaccagtgggggagaagcagctgcaccatcaactggccaggtgaatctggggcttggtacacagggttcatcatctacactttcattctggggttcctggtacccctcaccatcatctgtctttgctacctgttcattatcatcaaggtgaagtcctctggaatccgagtgggctcctctaagaggaagaagtctgagaagaaggtcacccgaatggtgtccatcgtggtggctgtcttcatcttctgctggcttcccttctacatattcaacgtttcttccgtctccatggccatcagccccaccccagcccttaaaggcatgtttgactttgtggtggtcctcacctatgctaacagctgtgccaaccctatcctatatgccttcttgtctgacaacttcaagaagagcttccagaatgtcctctgcttggtcaaggtgagcggcacagatgatggggagcggagtgacagtaagcaggacaaatcccggctgaatgagaccacggagacccagaggaccctcctcaatggagacctccaaaccagtatctgaactgcttggggggtgggaaagaaccaagccatgctctgtctactggcaatgggctccctacccacactggcttcctgcctcccacccctcacacctggcttctagaatagaggattgctcagcatgagtccaattcagagaacggtgtttgagtcagcttgtctgattgaatgataatgtgctaaattgattacctcccccttaaagcgaacactgaaatgcaggtagacaattcaaagtctggagaagagggatcatgcctggatatgatctttagaaacaacaaaaatagaaaaaaataagtatctgtgtgtttgtgtattgaaaactcaatatgtaatcttgtgtttttatatgtatacttgtatattcctatttattctctgtataggcattacctacgttcctgtgtttacatacacaagtagcaaattcgagtatgcatagtgtagatggacatttgccacaacacactgcccgcagaaatggacttaccgtgaagccaataaagttcaagcttcagggatctctcttgcacgggccttgccaaggcccaggagggacttgggcagtatgttcatgtggtcatatgtttttgtaaaaaattgtgaaagtaagatatgtttgtattgtttttcttaaagaggaacctcgtataagcttcaagcctcacaaaccttctagcctctgcccttggggatttgcttcattaatttcaggcaagtgaggtcaatgtaagaagggaaagggagaagatatttgaagaaccagaatgtaaattcatgtgtttccacttctcagatatagtcagagaattattcatttgcccaaaaggacttaagtggttgtggtcatccatcattgtatttatcaagacaaagccaactttgttataagattgcatttttttcttttcaaattgctttagtttttcttagggagctatgagggggaaaaatcactaacatgaaaggcaaaaaatggactatgattcctgtggggaaacaatttcattctctccatcgtgaaaataagtgaataagagtgaagcaaaattacacctttatgagaaaccataaaattgtttttatttttcaggccagacatagcttcctaatgaaagaaaatggaaatgtaattcgacgactcctcaaaggggactttagaggacttcatacaaagctgggcattaagaaaaccacaatgcatggccgggcgtggtggcttacacctgtaatcccagcactttgggaggccgaggtgggtggatcacccgaggtcaggagttcgagaccagcctggccaacatggtgaaaccccatcactactaaaaatatgtaaattagtcgggcgtggtgtcacgtgcctgtaatcctagctgctcgggaggctgaggcaggagaatcacttgaacttgggaggtggaggttgcagtaagctgagattgtgccactgcactctagcctgagcaacaagagcaaaactcagtctcaaaaaaaaaaaaaaaaaaaaaaaaaaaaaaaaaa

SEQ ID NO: 156 - protein, 369 aa, Homo sapiens
MDMADEPLNGSHTWLSIPFDLNGSVVSTNTSNQTEPYYDLTSNAVLTFIYFVVCIIGLCGNTLVIYVILRYAKMKTITNIYILNLAIADELFMLGLPFLAMQVALVHWPFGKAICRVVMTVDGINQFTSIFCLTVMSIDRYLAVVHPIKSAKWRRPRTAKMITMAVWGVSLLVILPIMIYAGLRSNQWGRSSCTINWPGESGAWYTGFIIYTFILGFLVPLTIICLCYLFIIIKVKSSGIRVGSSKRKKSEKKVTRMVSIVVAVFIFCWLPFYIFNVSSVSMAISPTPALKGMFDFVVVLTYANSCANPILYAFLSDNFKKSFQNVLCLVKVSGTDDGERSDSKQDKSRLNETTETQRTLLNGDLQTSI

SEQ ID NO: 157 - DNA, 1245 bp, Homo sapiens
cgtcctcccttcttctcttgcagagcctgacgcaccccagggctgccgccatggagcccctgttcccagcctccacgcccagctggaacgcctcctccccgggggctgcctctggaggcggtgacaacaggacgctggtggggccggcgccctcggcaggggcccgggcggtgctggtgcccgtgctgtacctgctggtgtgtgcggccgggctgggcgggaacacgctggtcatctacgtggtgctgcgcttcgccaagatgaagaccgtcaccaacatctacattctcaacctggcagtggccgacgtcctgtacatgctggggctgcctttcctggccacgcagaacgccgcgtccttctggcccttcggccccgtcctgtgccgcctggtcatgacgctggacggcgtcaaccagttcaccagtgtcttctgcctgacagtcatgagcgtggaccgctacctggcagtggtgcacccgctgagctcggcccgctggcgccgcccgcgtgtggccaagctggcgagcgccgcggcctgggtcctgtctctgtgcatgtcgctgccgctcctggtgttcgcggacgtgcaggagggcggtacctgcaacgccagctggccggagcccgtggggctgtggggcgccgtcttcatcatctacacggccgtgctgggcttcttcgcgccgctgctggtcatctgcctgtgctacctgctcatcgtggtgaaggtgagggcggcgggcgtgcgcgtgggctgcgtgcggcggcgctcggagcggaaggtgacgcgcatggtgttggtggtggtgctggtgtttgcgggatgttggctgcccttcttcaccgtcaacatcgtcaacctggccgtggcgctgccccaggagcccgcctccgccggcctctacttcttcgtggtcatcctctcctacgccaacagctgtgccaaccccgtcctctacggcttcctctctgacaacttccgccagagcttccagaaggttctgtgcctccgcaagggctctggtgccaaggacgctgacgccacggagccgcgtccagacaggatccggcagcagcaggaggccacgccgcccgcgcaccgcgccgcagccaacgggcttatgcagaccagcaagctgtgagagtgcaggcggggggtgggcggccccgtgtcacccccaggagcggaggttgcactgcggtgacccccacccatgacctgccagtcaggatgctccccgg

SEQ ID NO: 158 - protein, 364 aa, Homo sapiens
MEPLFPASTPSWNASSPGAASGGGDNRTLVGPAPSAGARAVLVPVLYLLVCAAGLGGNTLVIYVVLRFAKMKTVTNIYILNLAVADVLYMLGLPFLATQNAASFWPFGPVLCRLVMTLDGVNQFTSVFCLTVMSVDRYLAVVHPLSSARWRRPRVAKLASAAAWVLSLCMSLPLLVFADVQEGGTCNASWPEPVGLWGAVFIIYTAVLGFFAPLLVICLCYLLIVVKVRAAGVRVGCVRRRSERKVTRMVLVVVLVFAGCWLPFFTVNIVNLAVALPQEPASAGLYFFVVILSYANSCANPVLYGFLSDNFRQSFQKVLCLRKGSGAKDADATEPRPDRIRQQQEATPPAHRAAANGLMQTSKL

SEQ ID NO: 159 - DNA, 5717 bp, Homo sapiens
ggctaccgctcccggcttggcgtcccgcgcgcacttcggcgatggcttttccgccgcggcgacggctgcgcctcggtccccgcggcctcccgcttcttctctcgggactcctgctacctctgtgccgcgccttcaacctagacgtggacagtcctgccgagtactctggccccgagggaagttacttcggcttcgccgtggatttcttcgtgcccagcgcgtcttcccggatgtttcttctcgtgggagctcccaaagcaaacaccacccagcctgggattgtggaaggagggcaggtcctcaaatgtgactggtcttctacccgccggtgccagccaattgaatttgatgcaacaggcaatagagattatgccaaggatgatccattggaatttaagtcccatcagtggtttggagcatctgtgaggtcgaaacaggataaaattttggcctgtgccccattgtaccattggagaactgagatgaaacaggagcgagagcctgttggaacatgctttcttcaagatggaacaaagactgttgagtatgctccatgtagatcacaagatattgatgctgatggacagggattttgtcaaggaggattcagcattgattttactaaagctgacagagtacttcttggtggtcctggtagcttttattggcaaggtcagcttatttcggatcaagtggcagaaatcgtatctaaatacgaccccaatgtttacagcatcaagtataataaccaattagcaactcggactgcacaagctatttttgatgacagctatttgggttattctgtggctgtcggagatttcaatggtgatggcatagatgactttgtttcaggagttccaagagcagcaaggactttgggaatggtttatatttatgatgggaagaacatgtcctccttatacaattttactggcgagcagatggctgcatatttcggattttctgtagctgccactgacattaatggagatgattatgcagatgtgtttattggagcacctctcttcatggatcgtggctctgatggcaaactccaagaggtggggcaggtctcagtgtctctacagagagcttcaggagacttccagacgacaaagctgaatggatttgaggtctttgcacggtttggcagtgccatagctcctttgggagatctggaccaggatggtttcaatgatattgcaattgctgctccatatgggggtgaagataaaaaaggaattgtttatatcttcaatggaagatcaacaggcttgaacgcagtcccatctcaaatccttgaagggcagtgggctgctcgaagcatgccaccaagctttggctattcaatgaaaggagccacagatatagacaaaaatggatatccagacttaattgtaggagcttttggtgtagatcgagctatcttatacagggccagaccagttatcactgtaaatgctggtcttgaagtgtaccctagcattttaaatcaagacaataaaacctgctcactgcctggaacagctctcaaagtttcctgttttaatgttaggttctgcttaaaggcagatggcaaaggagtacttcccaggaaacttaatttccaggtggaacttcttttggataaactcaagcaaaagggagcaattcgacgagcactgtttctctacagcaggtccccaagtcactccaagaacatgactatttcaagggggggactgatgcagtgtgaggaattgatagcgtatctgcgggatgaatctgaatttagagacaaactcactccaattactatttttatggaatatcggttggattatagaacagctgctgatacaacaggcttgcaacccattcttaaccagttcacgcctgctaacattagtcgacaggctcacattctacttgactgtggtgaagacaatgtctgtaaacccaagctggaagtttctgtagatagtgatcaaaagaagatctatattggggatgacaaccctctgacattgattgttaaggctcagaatcaaggagaaggtgcctacgaagctgagctcatcgtttccattccactgcaggctgatttcatcggggttgtccgaaacaatgaagccttagcaagactttcctgtgcatttaagacagaaaaccaaactcgccaggtggtatgtgaccttggaaacccaatgaaggctggaactcaactcttagctggtcttcgtttcagtgtgcaccagcagtcagagatggatacttctgtgaaatttgacttacaaatccaaagctcaaatctatttgacaaagtaagcccagttgtatctcacaaagttgatcttgctgttttagctgcagttgagataagaggagtctcgagtcctgatcatatctttcttccgattccaaactgggagcacaaggagaaccctgagactgaagaagatgttgggccagttgttcagcacatctatgagctgagaaacaatggtccaagttcattcagcaaggcaatgctccatcttcagtggccttacaaatataataataacactctgttgtatatccttcattatgatattgatggaccaatgaactgcacttcagatatggagatcaaccctttgagaattaagatctcatctttgcaaacaactgaaaagaatgacacggttgccgggcaaggtgagcgggaccatctcatcactaagcgggatcttgccctcagtgaaggagatattcacactttgggttgtggagttgctcagtgcttgaagattgtctgccaagttgggagattagacagaggaaagagtgcaatcttgtacgtaaagtcattactgtggactgagacttttatgaataaagaaaatcagaatcattcctattctctgaagtcgtctgcttcatttaatgtcatagagtttccttataagaatcttccaattgaggatatcaccaactccacattggttaccactaatgtcacctggggcattcagccagcgcccatgcctgtgcctgtgtgggtgatcattttagcagttctagcaggattgttgctactggctgttttggtatttgtaatgtacaggatgggcttttttaaacgggtccggccacctcaagaagaacaagaaagggagcagcttcaacctcatgaaaatggtgaaggaaactcagaaacttaactgcagtttttaagttatgctacatcttgacccactagaattagcaactttattatagatttaaactttcttcatgaggagtaaaaatccaaggctttactgctgatagtgctaattggcattaaccacaaaatgagaattatatttgtcaaccttctccttataaataagttcagacatacatttaataacatagggtgacttgtgtttttaggtatttaaataataaaatttcaagggatagtttttattcaatgtatataagacaggtagtgcctgatttactactttatataaaatagtacctccttcagttactgtttctgatttaatgtacggaactttatttgttgttgttgttgttgttgttgttgttgttttaaagcagtccaaatttggaccttagcaatcatgtcttttgtataggtacttaatgttaatacatattacactacagtttacttttcagaatactaaagactttataactgcatgaacttggatttttttaatcactcatatggtagaattttataaacacatacatgataccatccaaattcttgcttttaataacaaaggtacaatattttgttttagtatgaaaatctggtagatcctattacacttctgtttatattaaatccacaatattttattacatttttaacttgtataaattttaggtcaaatccttcaagccaacctatactaaaaattagttccataatcacaaatggctcttttgtgtaattgtttaatttcacctgaatatcataatgcttaaagccatatggagttggaaattatttccaaagcatatttattccattgttttagtctggctatttacagtataaaaaaagcattttattaaaatactgtgtagttctttgagatagttgcttatgcatatagtaagtattacattcttagagtagagcagagtttttagttagtattaatttattttcctccattcatgtacttttccttatatttccaaaactgttactgagaatgggtcaagatcagtgagaaatctttacagttgacaggaacctggaccccttaccccaactttatgagtaatgcttggaataaaaaactcttaaggcaactcactgatttacttctagcaatagcatgatgttacaggaatattacctctgtttaagcaaggtaatgtgtaaaatcagtctcggctgtcagaataacttctaaaaggtatttttataagcagttcaagttactgaaaaccttttaaacctttctgaagttcgttagtataaattacttttctaggattattaataaaagccacataggtggcaagttgtagttttatatggctctgtagagtggtgaaccttctagaggaatatatgatttattcacagttcctcaaggcctggggatgatgatcagttatacctatttttgtgcaattacatcatgttgtacattagaaatggagagtttaatagctctttaactgctgtcctcattaggtaatgataaatatttcccttaaataattgactattttgctgtgttttaaaaatgattgaaatttatcttgccatatctcataatttcatgcacaagttgactgagctaatcttgagaatatattcgtaaaataggagcacatttagttgaggtatacaaggtaggactctagacaaaaccttctattttagctttagtgaatttcaaaagtaatgggtcttggagtatagatttttattagtagcttgaaagagcttaatcatatgcagtaagtatttttattaccaataaatttaaaattttttaagaaaaatatttttatcctagggccaagtgttgcctgccaccaatcagtaagttagtctataacaaattttaccctaacagttttaccacctagcaacagtcatttctgaaaatatgttggatagaaagtcactctttggcaaaagtgttagaatttgcttttgtgccatctattccttttatggcatctatcttgaaagtaatcttgtattggagattgaaagatgctgtaatttagaaattaacatgatatcttaaattacctttatgaaatatagttttgtataatagcatagattttccttcaaaaaatgaacatttatatatctacaaaaatatggagaagagcaatttgaaagcctactttctgaagaaaatggtgggatttttttttatcatgattaaatatcaaaaaattgccctatgaaaactttaaatctctaaaacatttgaaatactaccatatttgtgatttattgagaataaaaatccattttgaaatgtaaaatttttatgatctgattcagttttaagaaaacatgaatgaactagaagatattaaaaacatttgacattggtaagaaatattgatactgatattgatttttatataggtatttatttcagaattgatattttgagaaaaatacatgtgagtcattttttctgtttctcttttctcttaacgattatcactgtaattctgaatct

SEQ ID NO: 160 - protein, 1048 aa, Homo sapiens
MAFPPRRRLRLGPRGLPLLLSGLLLPLCRAFNLDVDSPAEYSGPEGSYFGFAVDFFVPSASSRMFLLVGAPKANTTQPGIVEGGQVLKCDWSSTRRCQPIEFDATGNRDYAKDDPLEFKSHQWFGASVRSKQDKILACAPLYHWRTEMKQEREPVGTCFLQDGTKTVEYAPCRSQDIDADGQGFCQGGFSIDFTKADRVLLGGPGSFYWQGQLISDQVAEIVSKYDPNVYSIKYNNQLATRTAQAIFDDSYLGYSVAVGDFNGDGIDDFVSGVPRAARTLGMVYIYDGKNMSSLYNFTGEQMAAYFGFSVAATDINGDDYADVFIGAPLFMDRGSDGKLQEVGQVSVSLQRASGDFQTTKLNGFEVFARFGSAIAPLGDLDQDGFNDIAIAAPYGGEDKKGIVYIFNGRSTGLNAVPSQILEGQWAARSMPPSFGYSMKGATDIDKNGYPDLIVGAFGVDRAILYRARPVITVNAGLEVYPSILNQDNKTCSLPGTALKVSCFNVRFCLKADGKGVLPRKLNFQVELLLDKLKQKGAIRRALFLYSRSPSHSKNMTISRGGLMQCEELIAYLRDESEFRDKLTPITIFMEYRLDYRTAADTTGLQPILNQFTPANISRQAHILLDCGEDNVCKPKLEVSVDSDQKKIYIGDDNPLTLIVKAQNQGEGAYEAELIVSIPLQADFIGVVRNNEALARLSCAFKTENQTRQVVCDLGNPMKAGTQLLAGLRFSVHQQSEMDTSVKFDLQIQSSNLFDKVSPVVSHKVDLAVLAAVEIRGVSSPDHIFLPIPNWEHKENPETEEDVGPVVQHIYELRNNGPSSFSKAMLHLQWPYKYNNNTLLYILHYDIDGPMNCTSDMEINPLRIKISSLQTTEKNDTVAGQGERDHLITKRDLALSEGDIHTLGCGVAQCLKIVCQVGRLDRGKSAILYVKSLLWTETFMNKENQNHSYSLKSSASFNVIEFPYKNLPIEDITNSTLVTTNVTWGIQPAPMPVPVWVIILAVLAGLLLLAVLVFVMYRMGFFKRVRPPQEEQEREQLQPHENGEGNSET

SEQ ID NO: 161 - DNA, 2397 bp, Homo sapiens
gcaagaactgaaacgaatggggattgaactgctttgcctgttctttctatttctaggaaggaatgatcacgtacaaggtggctgtgccctgggaggtgcagaaacctgtgaagactgcctgcttattggacctcagtgtgcctggtgtgctcaggagaattttactcatccatctggagttggcgaaaggtgtgataccccagcaaaccttttagctaaaggatgtcaattaaacttcatcgaaaaccctgtctcccaagtagaaatacttaaaaataagcctctcagtgtaggcagacagaaaaatagttctgacattgttcagattgcgcctcaaagcttgatccttaagttgagaccaggtggtgcgcagactctgcaggtgcatgtccgccagactgaggactacccggtggatttgtattacctcatggacctctccgcctccatggatgacgacctcaacacaataaaggagctgggctcccggctttccaaagagatgtctaaattaaccagcaactttagactgggcttcggatcttttgtggaaaaacctgtatcccctttcgtgaaaacaacaccagaagaaattgccaacccttgcagtagtattccatacttctgtttacctacatttggattcaagcacattttgccattgacaaatgatgctgaaagattcaatgaaattgtgaagaatcagaaaatttctgctaatattgacacacccgaaggtggatttgatgcaattatgcaagctgctgtgtgtaaggaaaaaattggctggcggaatgactccctccacctcctggtctttgtgagtgatgctgattctcattttggaatggacagcaaactagcaggcatcgtcattcctaatgacgggctctgtcacttggacagcaagaatgaatactccatgtcaactgtcttggaatatccaacaattggacaactcattgataaactggtacaaaacaacgtgttattgatcttcgctgtaacccaagaacaagttcatttatatgagaattacgcaaaacttattcctggagctacagtaggtctacttcagaaggactccggaaacattctccagctgatcatctcagcttatgaagaactgcggtctgaggtggaactggaagtattaggagacactgaaggactcaacttgtcatttacagccatctgtaacaacggtaccctcttccaacaccaaaagaaatgctctcacatgaaagtgggagacacagcttccttcagcgtgactgtgaatatcccacactgcgagagaagaagcaggcacattatcataaagcctgtggggctgggggatgccctggaattacttgtcagcccagaatgcaactgcgactgtcagaaagaagtggaagtgaacagctccaaatgtcaccacgggaacggctctttccagtgtggggtgtgtgcctgccaccctggccacatggggcctcgctgtgagtgtggcgaggacatgctgagcacagattcctgcaaggaggccccagatcatccctcctgcagcggaaggggtgactgctactgtgggcagtgtatctgccacttgtctccctatggaaacatttatgggccttattgccagtgtgacaatttctcctgcgtgagacacaaagggctgctctgcggaggtaacggcgactgtgactgtggtgaatgtgtgtgcaggagcggctggactggcgagtactgcaactgcaccaccagcacggactcctgcgtctctgaagatggagtgctctgcagcgggcgcggggactgtgtttgtggcaagtgtgtttgcacaaaccctggagcctcaggaccaacctgtgaacgatgtcctacctgtggtgacccctgtaactctaaacggagctgcattgagtgccacctgtcagcagctggccaagcccgagaagaatgtgtggacaagtgcaaactagctggtgcgaccatcagtgaagaagaagatttctcaaaggatggttctgtttcctgctctctgcaaggagaaaatgaatgtcttattacattcctaataactacagataatgaggggaaaaccatcattcacagcatcaatgaaaaagattgtccgaagcctccaaacattcccatgatcatgttaggggtttccctggctattcttctcatcggggttgtcctactgtgcatctggaagctactggtgtcatttcatgatcgtaaagaagttgccaaatttgaagcagaacgatcaaaagccaagtggcaaacgggaaccaatccactctacagaggatccacaagtacttttaaaaatgtaacttataaacacagggaaaaacaaaaggtagacctttccacagattgctagaactactttatgca

SEQ ID NO: 162 - protein, 788 aa, Homo sapiens
MGIELLCLFFLFLGRNDHVQGGCALGGAETCEDCLLIGPQCAWCAQENFTHPSGVGERCDTPANLLAKGCQLNFIENPVSQVEILKNKPLSVGRQKNSSDIVQIAPQSLILKLRPGGAQTLQVHVRQTEDYPVDLYYLMDLSASMDDDLNTIKELGSRLSKEMSKLTSNFRLGFGSFVEKPVSPFVKTTPEEIANPCSSIPYFCLPTFGFKHILPLTNDAERFNEIVKNQKISANIDTPEGGFDAIMQAAVCKEKIGWRNDSLHLLVFVSDADSHFGMDSKLAGIVIPNDGLCHLDSKNEYSMSTVLEYPTIGQLIDKLVQNNVLLIFAVTQEQVHLYENYAKLIPGATVGLLQKDSGNILQLIISAYEELRSEVELEVLGDTEGLNLSFTAICNNGTLFQHQKKCSHMKVGDTASFSVTVNIPHCERRSRHIIIKPVGLGDALELLVSPECNCDCQKEVEVNSSKCHHGNGSFQCGVCACHPGHMGPRCECGEDMLSTDSCKEAPDHPSCSGRGDCYCGQCICHLSPYGNIYGPYCQCDNFSCVRHKGLLCGGNGDCDCGECVCRSGWTGEYCNCTTSTDSCVSEDGVLCSGRGDCVCGKCVCTNPGASGPTCERCPTCGDPCNSKRSCIECHLSAAGQAREECVDKCKLAGATISEEEDFSKDGSVSCSLQGENECLITFLITTDNEGKTIIHSINEKDCPKPPNIPMIMLGVSLAILLIGVVLLCIWKLLVSFHDRKEVAKFEAERSKAKWQTGTNPLYRGSTSTFKNVTYKHREKQKVDLSTDC

SEQ ID NO: 163 - DNA, 3036 bp, Homo sapiens
cgaccagcagaccagacagtcacagcagccttgacaaaacgttcctggaactcaagcacttctccacagaggaggacagagcagacagcagagaccatggagtctccctcggcccctccccacagatggtgcatcccctggcagaggctcctgctcacagcctcacttctaaccttctggaacccgcccaccactgccaagctcactattgaatccacgccgttcaatgtcgcagaggggaaggaggtgcttctacttgtccacaatctgccccagcatctttttggctacagctggtacaaaggtgaaagagtggatggcaaccgtcaaattataggatatgtaataggaactcaacaagctaccccagggcccgcatacagtggtcgagagataatataccccaatgcatccctgctgatccagaacatcatccagaatgacacaggattctacaccctacacgtcataaagtcagatcttgtgaatgaagaagcaactggccagttccgggtatacccggagctgcccaagccctccatctccagcaacaactccaaacccgtggaggacaaggatgctgtggccttcacctgtgaacctgagactcaggacgcaacctacctgtggtgggtaaacaatcagagcctcccggtcagtcccaggctgcagctgtccaatggcaacaggaccctcactctattcaatgtcacaagaaatgacacagcaagctacaaatgtgaaacccagaacccagtgagtgccaggcgcagtgattcagtcatcctgaatgtcctctatggcccggatgcccccaccatttcccctctaaacacatcttacagatcaggggaaaatctgaacctctcctgccatgcagcctctaacccacctgcacagtactcttggtttgtcaatgggactttccagcaatccacccaagagctctttatccccaacatcactgtgaataatagtggatcctatacgtgccaagcccataactcagacactggcctcaataggaccacagtcacgacgatcacagtctatgcagagccacccaaacccttcatcaccagcaacaactccaaccccgtggaggatgaggatgctgtagccttaacctgtgaacctgagattcagaacacaacctacctgtggtgggtaaataatcagagcctcccggtcagtcccaggctgcagctgtccaatgacaacaggaccctcactctactcagtgtcacaaggaatgatgtaggaccctatgagtgtggaatccagaacgaattaagtgttgaccacagcgacccagtcatcctgaatgtcctctatggcccagacgaccccaccatttccccctcatacacctattaccgtccaggggtgaacctcagcctctcctgccatgcagcctctaacccacctgcacagtattcttggctgattgatgggaacatccagcaacacacacaagagctctttatctccaacatcactgagaagaacagcggactctatacctgccaggccaataactcagccagtggccacagcaggactacagtcaagacaatcacagtctctgcggagctgcccaagccctccatctccagcaacaactccaaacccgtggaggacaaggatgctgtggccttcacctgtgaacctgaggctcagaacacaacctacctgtggtgggtaaatggtcagagcctcccagtcagtcccaggctgcagctgtccaatggcaacaggaccctcactctattcaatgtcacaagaaatgacgcaagagcctatgtatgtggaatccagaactcagtgagtgcaaaccgcagtgacccagtcaccctggatgtcctctatgggccggacacccccatcatttcccccccagactcgtcttacctttcgggagcgaacctcaacctctcctgccactcggcctctaacccatccccgcagtattcttggcgtatcaatgggataccgcagcaacacacacaagttctctttatcgccaaaatcacgccaaataataacgggacctatgcctgttttgtctctaacttggctactggccgcaataattccatagtcaagagcatcacagtctctgcatctggaacttctcctggtctctcagctggggccactgtcggcatcatgattggagtgctggttggggttgctctgatatagcagccctggtgtagtttcttcatttcaggaagactgacagttgttttgcttcttccttaaagcatttgcaacagctacagtctaaaattgcttctttaccaaggatatttacagaaaagactctgaccagagatcgagaccatcctagccaacatcgtgaaaccccatctctactaaaaatacaaaaatgagctgggcttggtggcgcgcacctgtagtcccagttactcgggaggctgaggcaggagaatcgcttgaacccgggaggtggagattgcagtgagcccagatcgcaccactgcactccagtctggcaacagagcaagactccatctcaaaaagaaaagaaaagaagactctgacctgtactcttgaatacaagtttctgataccactgcactgtctgagaatttccaaaactttaatgaactaactgacagcttcatgaaactgtccaccaagatcaagcagagaaaataattaatttcatgggactaaatgaactaatgaggataatattttcataattttttatttgaaattttgctgattctttaaatgtcttgtttcccagatttcaggaaactttttttcttttaagctatccacagcttacagcaatttgataaaatatacttttgtgaacaaaaattgagacatttacattttctccctatgtggtcgctccagacttgggaaactattcatgaatatttatattgtatggtaatatagttattgcacaagttcaataaaaatctgctctttgtatgacagaatacatttgaaaacattggttatattaccaagactttgactagaatgtcgtat

SEQ ID NO: 164 - protein, 702 aa, Homo sapiens
MESPSAPPHRWCIPWQRLLLTASLLTFWNPPTTAKLTIESTPFNVAEGKEVLLLVHNLPQHLFGYSWYKGERVDGNRQIIGYVIGTQQATPGPAYSGREIIYPNASLLIQNIIQNDTGFYTLHVIKSDLVNEEATGQFRVYPELPKPSISSNNSKPVEDKDAVAFTCEPETQDATYLWWVNNQSLPVSPRLQLSNGNRTLTLFNVTRNDTASYKCETQNPVSARRSDSVILNVLYGPDAPTISPLNTSYRSGENLNLSCHAASNPPAQYSWFVNGTFQQSTQELFIPNITVNNSGSYTCQAHNSDTGLNRTTVTTITVYAEPPKPFITSNNSNPVEDEDAVALTCEPEIQNTTYLWWVNNQSLPVSPRLQLSNDNRTLTLLSVTRNDVGPYECGIQNELSVDHSDPVILNVLYGPDDPTISPSYTYYRPGVNLSLSCHAASNPPAQYSWLIDGNIQQHTQELFISNITEKNSGLYTCQANNSASGHSRTTVKTITVSAELPKPSISSNNSKPVEDKDAVAFTCEPEAQNTTYLWWVNGQSLPVSPRLQLSNGNRTLTLFNVTRNDARAYVCGIQNSVSANRSDPVTLDVLYGPDTPIISPPDSSYLSGANLNLSCHSASNPSPQYSWRINGIPQQHTQVLFIAKITPNNNGTYACFVSNLATGRNNSIVKSITVSASGTSPGLSAGATVGIMIGVLVGVALI

SEQ ID NO: 165 - DNA, 90 bp, Homo sapiens
ttggctttggtcttcaagtagccaaagcgatgaaatatcttgcaagcaaaaagtttgtccacagagacttggctgcaagaaactgtatgt

SEQ ID NO: 166 - protein, 22 aa, Homo sapiens
KAMKYLASKKFVHRDLAARNCM

SEQ ID NO: 167 - DNA, 1804 bp, Homo sapiens
cgctccacctctcaagcagccagcgcctgcctgaatctgttctgccccctccccacccatttcaccaccaccatgacaccgggcacccagtctcctttcttcctgctgctgctcctcacagtgcttacagttgttacaggttctggtcatgcaagctctaccccaggtggagaaaaggagacttcggctacccagagaagttcagtgcccagctctactgagaagaatgctgtgagtatgaccagcagcgtactctccagccacagccccggttcaggctcctccaccactcagggacaggatgtcactctggccccggccacggaaccagcttcaggttcagctgccacctggggacaggatgtcacctcggtcccagtcaccaggccagccctgggctccaccaccccgccagcccacgatgtcacctcagccccggacaacaagccagccccgggctccaccgcccccccagcccacggtgtcacctcggccccggacaccaggccggccccgggctccaccgcccccccagcccatggtgtcacctcggccccggacaacaggcccgccttgggctccaccgcccctccagtccacaatgtcacctcggcctcaggctctgcatcaggctcagcttctactctggtgcacaacggcacctctgccagggctaccacaaccccagccagcaagagcactccattctcaattcccagccaccactctgatactcctaccacccttgccagccatagcaccaagactgatgccagtagcactcaccatagcacggtacctcctctcacctcctccaatcacagcacttctccccagttgtctactggggtctctttctttttcctgtcttttcacatttcaaacctccagtttaattcctctctggaagatcccagcaccgactactaccaagagctgcagagagacatttctgaaatgtttttgcagatttataaacaagggggttttctgggcctctccaatattaagttcaggccaggatctgtggtggtacaattgactctggccttccgagaaggtaccatcaatgtccacgacgtggagacacagttcaatcagtataaaacggaagcagcctctcgatataacctgacgatctcagacgtcagcgtgagtgatgtgccatttcctttctctgcccagtctggggctggggtgccaggctggggcatcgcgctgctggtgctggtctgtgttctggttgcgctggccattgtctatctcattgccttggctgtctgtcagtgccgccgaaagaactacgggcagctggacatctttccagcccgggatacctaccatcctatgagcgagtaccccacctaccacacccatgggcgctatgtgccccctagcagtaccgatcgtagcccctatgagaaggtttctgcaggtaatggtggcagcagcctctcttacacaaacccagcagtggcagccacttctgccaacttgtaggggcacgtcgcccgctgagctgagtggccagccagtgccattccactccactcaggttcttcagggccagagcccctgcaccctgtttgggctggtgagctgggagttcaggtgggctgctcacaccgtccttcagaggccccaccaatttctcggacacttctcagtgtgtggaagctcatgtgggcccctgaggctcatgcctgggaagtgttgtggtgggggctcccaggaggactggcccagagagccctgagatagcggggatcctgaactggactgaataaaacgtggtctcccactg

SEQ ID NO: 168 - protein, 475 aa, Homo sapiens
MTPGTQSPFFLLLLLTVLTVVTGSGHASSTPGGEKETSATQRSSVPSSTEKNAVSMTSSVLSSHSPGSGSSTTQGQDVTLAPATEPASGSAATWGQDVTSVPVTRPALGSTTPPAHDVTSAPDNKPAPGSTAPPAHGVTSAPDTRPAPGSTAPPAHGVTSAPDNRPALGSTAPPVHNVTSASGSASGSASTLVHNGTSARATTTPASKSTPFSIPSHHSDTPTTLASHSTKTDASSTHHSTVPPLTSSNHSTSPQLSTGVSFFFLSFHISNLQFNSSLEDPSTDYYQELQRDISEMFLQIYKQGGFLGLSNIKFRPGSVVVQLTLAFREGTINVHDVETQFNQYKTEAASRYNLTISDVSVSDVPFPFSAQSGAGVPGWGIALLVLVCVLVALAIVYLIALAVCQCRRKNYGQLDIFPARDTYHPMSEYPTYHTHGRYVPPSSTDRSPYEKVSAGNGGSSLSYTNPAVAATSANL

SEQ ID NO: 169 - DNA, 1552 bp, Homo sapiens
gcccgtacacaccgtgtgctgggacaccccacagtcagccgcatggctcccctgtgccccagcccctggctccctctgttgatcccggcccctgctccaggcctcactgtgcaactgctgctgtcactgctgcttctgatgcctgtccatccccagaggttgccccggatgcaggaggattcccccttgggaggaggctcttctggggaagatgacccactgggcgaggaggatctgcccagtgaagaggattcacccagagaggaggatccacccggagaggaggatctacctggagaggaggatctacctggagaggaggatctacctgaagttaagcctaaatcagaagaagagggctccctgaagttagaggatctacctactgttgaggctcctggagatcctcaagaaccccagaataatgcccacagggacaaagaaggggatgaccagagtcattggcgctatggaggcgacccgccctggccccgggtgtccccagcctgcgcgggccgcttccagtccccggtggatatccgcccccagctcgccgccttctgcccggccctgcgccccctggaactcctgggcttccagctcccgccgctcccagaactgcgcctgcgcaacaatggccacagtgtgcaactgaccctgcctcctgggctagagatggctctgggtcccgggcgggagtaccgggctctgcagctgcatctgcactggggggctgcaggtcgtccgggctcggagcacactgtggaaggccaccgtttccctgccgagatccacgtggttcacctcagcaccgcctttgccagagttgacgaggccttggggcgcccgggaggcctggccgtgttggccgcctttctggaggagggcccggaagaaaacagtgcctatgagcagttgctgtctcgcttggaagaaatcgctgaggaaggctcagagactcaggtcccaggactggacatatctgcactcctgccctctgacttcagccgctacttccaatatgaggggtctctgactacaccgccctgtgcccagggtgtcatctggactgtgtttaaccagacagtgatgctgagtgctaagcagctccacaccctctctgacaccctgtggggacctggtgactctcggctacagctgaacttccgagcgacgcagcctttgaatgggcgagtgattgaggcctccttccctgctggagtggacagcagtcctcgggctgctgagccagtccagctgaattcctgcctggctgctggtgacatcctagccctggtttttggcctcctttttgctgtcaccagcgtcgcgttccttgtgcagatgagaaggcagcacagaaggggaaccaaagggggtgtgagctaccgcccagcagaggtagccgagactggagcctagaggctggatcttggagaatgtgagaagccagccagaggcatctgagggggagccggtaactgtcctgtcctgctcattatgccacttccttttaactgccaagaaattttttaaaataaatatttataat

SEQ ID NO: 170 - protein, 459 aa, Homo sapiens
MAPLCPSPWLPLLIPAPAPGLTVQLLLSLLLLMPVHPQRLPRMQEDSPLGGGSSGEDDPLGEEDLPSEEDSPREEDPPGEEDLPGEEDLPGEEDLPEVKPKSEEEGSLKLEDLPTVEAPGDPQEPQNNAHRDKEGDDQSHWRYGGDPPWPRVSPACAGRFQSPVDIRPQLAAFCPALRPLELLGFQLPPLPELRLRNNGHSVQLTLPPGLEMALGPGREYRALQLHLHWGAAGRPGSEHTVEGHRFPAEIHVVHLSTAFARVDEALGRPGGLAVLAAFLEEGPEENSAYEQLLSRLEEIAEEGSETQVPGLDISALLPSDFSRYFQYEGSLTTPPCAQGVIWTVFNQTVMLSAKQLHTLSDTLWGPGDSRLQLNFRATQPLNGRVIEASFPAGVDSSPRAAEPVQLNSCLAAGDILALVFGLLFAVTSVAFLVQMRRQHRRGTKGGVSYRPAEVAETGA

SEQ ID NO: 171 - DNA, 1595 bp, Homo sapiens
ccccggcgcagcgcggccgcagcagcctccgccccccgcacggtgtgagcgcccgacgcggccgaggcggccggagtcccgagctagccccggcggccgccgccgcccagaccggacgacaggccacctcgtcggcgtccgcccgagtccccgcctcgccgccaacgccacaaccaccgcgcacggccccctgactccgtccagtattgatcgggagagccggagcgagctcttcggggagcagcgatgcgaccctccgggacggccggggcagcgctcctggcgctgctggctgcgctctgcccggcgagtcgggctctggaggaaaagaaagtttgccaaggcacgagtaacaagctcacgcagttgggcacttttgaagatcattttctcagcctccagaggatgttcaataactgtgaggtggtccttgggaatttggaaattacctatgtgcagaggaattatgatctttccttcttaaagaccatccaggaggtggctggttatgtcctcattgccctcaacacagtggagcgaattcctttggaaaacctgcagatcatcagaggaaatatgtactacgaaaattcctatgccttagcagtcttatctaactatgatgcaaataaaaccggactgaaggagctgcccatgagaaatttacaggaaatcctgcatggcgccgtgcggttcagcaacaaccctgccctgtgcaacgtggagagcatccagtggcgggacatagtcagcagtgactttctcagcaacatgtcgatggacttccagaaccacctgggcagctgccaaaagtgtgatccaagctgtcccaatgggagctgctggggtgcaggagaggagaactgccagaaactgaccaaaatcatctgtgcccagcagtgctccgggcgctgccgtggcaagtcccccagtgactgctgccacaaccagtgtgctgcaggctgcacaggcccccgggagagcgactgcctggtctgccgcaaattccgagacgaagccacgtgcaaggacacctgccccccactcatgctctacaaccccaccacgtaccagatggatgtgaaccccgagggcaaatacagctttggtgccacctgcgtgaagaagtgtccccgtaattatgtggtgacagatcacggctcgtgcgtccgagcctgtggggccgacagctatgagatggaggaagacggcgtccgcaagtgtaagaagtgcgaagggccttgccgcaaagtgtgtaacggaataggtattggtgaatttaaagactcactctccataaatgctacgaatattaaacacttcaaaaactgcacctccatcagtggcgatctccacatcctgccggtggcatttaggggtgactccttcacacatactcctcctctggatccacaggaactggatattctgaaaaccgtaaaggaaatcacaggtttgagctgaattatcacatgaatataaatgggaaatcagtgttttagagagagaacttttcgacatatttcctgttcccttggaataaaaacatttcttctgaaattttaccgttaaaaaaaaaaaaaaaaaaaaaaaaa

SEQ ID NO: 172 - protein, 405 aa, Homo sapiens
MRPSGTAGAALLALLAALCPASRALEEKKVCQGTSNKLTQLGTFEDHFLSLQRMFNNCEVVLGNLEITYVQRNYDLSFLKTIQEVAGYVLIALNTVERIPLENLQIIRGNMYYENSYALAVLSNYDANKTGLKELPMRNLQEILHGAVRFSNNPALCNVESIQWRDIVSSDFLSNMSMDFQNHLGSCQKCDPSCPNGSCWGAGEENCQKLTKIICAQQCSGRCRGKSPSDCCHNQCAAGCTGPRESDCLVCRKFRDEATCKDTCPPLMLYNPTTYQMDVNPEGKYSFGATCVKKCPRNYVVTDHGSCVRACGADSYEMEEDGVRKCKKCEGPCRKVCNGIGIGEFKDSLSINATNIKHFKNCTSISGDLHILPVAFRGDSFTHTPPLDPQELDILKTVKEITGLS

SEQ ID NO: 173 - DNA, 1437 bp, Homo sapiens
gcttcctcagacatgccgctgctgctactgctgcccctgctgtgggcaggggccctggctatggatccaaatttctggctgcaagtgcaggagtcagtgacggtacaggagggtttgtgcgtcctcgtgccctgcactttcttccatcccataccctactacgacaagaactccccagttcatggttactggttccgggaaggagccattatatccggggactctccagtggccacaaacaagctagatcaagaagtacaggaggagactcagggcagattccgcctccttggggatcccagtaggaacaactgctccctgagcatcgtagacgccaggaggagggataatggttcatacttctttcggatggagagaggaagtaccaaatacagttacaaatctccccagctctctgtgcatgtgacagacttgacccacaggcccaaaatcctcatccctggcactctagaacccggccactccaaaaaccttacctgctctgtgtcctgggcctgtgagcagggaacacccccgatcttctcctggttgtcagctgcccccacctccctgggccccaggactactcactcctcggtgctcataatcaccccacggccccaggaccacggcaccaacctgacctgtcaggtgaagttcgctggagctggtgtgactacggagagaaccatccagctcaacgtcacctatgttccacagaacccaacaactggtatctttccaggagatggctcagggaaacaagagaccagagcaggactggttcatggggccattggaggagctggtgttacagccctgctcgctctttgtctctgcctcatcttcttcatagtgaagacccacaggaggaaagcagccaggacagcagtgggcagcaatgacacccaccctaccacagggtcagcctccccgaaacaccagaagaactccaagttacatggccccactgaaacctcaagctgttcaggtgccgcccctactgtggagatggatgaggagctgcattatgcttccctcaactttcatgggatgaatccttccaaggacacctccaccgaatactcagaggtcaggacccagtgaggaaccctcaagagcatcaggctcagctagaagatccacatcctctacaggtcggggaccaaaggctgattcttggagatttaactccccacaggcaatgggtttatagacattatgtgagtttcctgctatattaacatcatcttgagactttgcaagcagagagtcgtggaatcaaatctgtgctctttcatttgctaagtgtatgatgtcacacaagctccttaaccttccatgtctccattttcttctctgtgaagtaggtataagaagtcctatctcatagggatgctgtgagcattaaataaaggtacacatggaaaacaccag

SEQ ID NO: 174 - protein, 364 aa, Homo sapiens
MPLLLLLPLLWAGALAMDPNFWLQVQESVTVQEGLCVLVPCTFFHPIPYYDKNSPVHGYWFREGAIISGDSPVATNKLDQEVQEETQGRFRLLGDPSRNNCSLSIVDARRRDNGSYFFRMERGSTKYSYKSPQLSVHVTDLTHRPKILIPGTLEPGHSKNLTCSVSWACEQGTPPIFSWLSAAPTSLGPRTTHSSVLIITPRPQDHGTNLTCQVKFAGAGVTTERTIQLNVTYVPQNPTTGIFPGDGSGKQETRAGLVHGAIGGAGVTALLALCLCLIFFIVKTHRRKAARTAVGSNDTHPTTGSASPKHQKNSKLHGPTETSSCSGAAPTVEMDEELHYASLNFHGMNPSKDTSTEYSEVRTQ

SEQ ID NO: 175 - DNA, 1968 bp, Homo sapiens
aggcccctgcctgccccagcatcccctgcgcgaagctgggtgccccggagagtctgaccaccatgccacctcctcgcctcctcttcttcctcctcttcctcacccccatggaagtcaggcccgaggaacctctagtggtgaaggtggaagagggagataacgctgtgctgcagtgcctcaaggggacctcagatggccccactcagcagctgacctggtctcgggagtccccgcttaaacccttcttaaaactcagcctggggctgccaggcctgggaatccacatgaggcccctggccatctggcttttcatcttcaacgtctctcaacagatggggggcttctacctgtgccagccggggcccccctctgagaaggcctggcagcctggctggacagtcaatgtggagggcagcggggagctgttccggtggaatgtttcggacctaggtggcctgggctgtggcctgaagaacaggtcctcagagggccccagctccccttccgggaagctcatgagccccaagctgtatgtgtgggccaaagaccgccctgagatctgggagggagagcctccgtgtctcccaccgagggacagcctgaaccagagcctcagccaggacctcaccatggcccctggctccacactctggctgtcctgtggggtaccccctgactctgtgtccaggggccccctctcctggacccatgtgcaccccaaggggcctaagtcattgctgagcctagagctgaaggacgatcgcccggccagagatatgtgggtaatggagacgggtctgttgttgccccgggccacagctcaagacgctggaaagtattattgtcaccgtggcaacctgaccatgtcattccacctggagatcactgctcggccagtactatggcactggctgctgaggactggtggctggaaggtctcagctgtgactttggcttatctgatcttctgcctgtgttcccttgtgggcattcttcatcttcaaagagccctggtcctgaggaggaaaagaaagcgaatgactgaccccaccaggagattcttcaaagtgacgcctcccccaggaagcgggccccagaaccagtacgggaacgtgctgtctctccccacacccacctcaggcctcggacgcgcccagcgttgggccgcaggcctggggggcactgccccgtcttatggaaacccgagcagcgacgtccaggcggatggagccttggggtcccggagcccgccgggagtgggcccagaagaagaggaaggggagggctatgaggaacctgacagtgaggaggactccgagttctatgagaacgactccaaccttgggcaggaccagctctcccaggatggcagcggctacgagaaccctgaggatgagcccctgggtcctgaggatgaagactccttctccaacgctgagtcttatgagaacgaggatgaagagctgacccagccggtcgccaggacaatggacttcctgagccctcatgggtcagcctgggaccccagccgggaagcaacctccctggcagggtcccagtcctatgaggatatgagaggaatcctgtatgcagccccccagctccgctccattcggggccagcctggacccaatcatgaggaagatgcagactcttatgagaacatggataatcccgatgggccagacccagcctggggaggagggggccgcatgggcacctggagcaccaggtgatcctcaggtggccagcctggatctcctcaagtccccaagattcacacctgactctgaaatctgaagacctcgagcagatgatgccaacctctggagcaatgttgcttaggatgtgtgcatgtgtgtaagtgtgtgtgtgtgtgtgtgtgtgtatacatgccagtgacacttccagtcccctttgtattccttaaataaactcaatgagctcttccaatcctaaaaaaaaaaa

SEQ ID NO: 176 - protein, 557 aa, Homo sapiens
MPPPRLLFFLLFLTPMEVRPEEPLVVKVEEGDNAVLQCLKGTSDGPTQQLTWSRESPLKPFLKLSLGLPGLGIHMRPLAIWLFIFNVSQQMGGFYLCQPGPPSEKAWQPGWTVNVEGSGELFRWNVSDLGGLGCGLKNRSSEGPSSPSGKLMSPKLYVWAKDRPEIWEGEPPCLPPRDSLNQSLSQDLTMAPGSTLWLSCGVPPDSVSRGPLSWTHVHPKGPKSLLSLELKDDRPARDMWVMETGLLLPRATAQDAGKYYCHRGNLTMSFHLEITARPVLWHWLLRTGGWKVSAVTLAYLIFCLCSLVGILHLQRALVLRRKRKRMTDPTRRFFKVTPPPGSGPQNQYGNVLSLPTPTSGLGRAQRWAAGLGGTAPSYGNPSSDVQADGALGSRSPPGVGPEEEEGEGYEEPDSEEDSEFYENDSNLGQDQLSQDGSGYENPEDEPLGPEDEDSFSNAESYENEDEELTQPVARTMDFLSPHGSAWDPSREATSLAGSQSYEDMRGILYAAPQLRSIRGQPGPNHEEDADSYENMDNPDGPDPAWGGGGRMGTWSTR

SEQ ID NO: 177 - protein, 609 aa, Homo sapiens
MVTHAMEEPKTFNIPTFVLDENCNFIPEVLSRANAKYIKDVLIQDSYNTVCLANSFIPMTIQTAEQIMVIITKFKFSRARDLFEKVLRLGVHINRFYAGKKQVKHMITMMKSLFDTEEAMRRLDRALMGLFVDARGSSYMPLIALSLHENGLPDSKFTKAVKLINTTLNSFHNRPDADIEQYAQKLRAYNYLYKIPHYTLKEAVDVYSENLKDLSIGVNKKPTLLFTSSDDGYLSHIFNDMLFLTSTWNMIYNCKVQIRRLTTWIKYEINSIVEDCVLVGFQLPDLKDTILDLAALTSNMNLVDPDKDLFSHYKLILEKLFEISIFATKANICILPTFIKSHLIEFEDVLKRSNDDEDLNYLLLKSNDSDDEYDEDKLPIQVDPGRVDNVLTDSNFFNVTADNAFSSIAIMPISYDKIIDVEENVIQVLEVEMQSLSAVVYGAVANKYGLSLPQVIKRLNQNEGRASSRASSSHSTSTIPYSPPQSGRSTPTSILRQRAPIRSNSRSSSVSFSQDDDNRSHYSDETNISDYSYPMADLDLEDEEPMEDHPHSPQSASSNNSMSRRSRALQNEQRRRTPTMAPPSPARGQNNARLRRRTRRSTETNDERL

SEQ ID NO: 178 - protein, 127 aa, Homo sapiens
MADKALHTPPPSTLRNNSYPGPPPATPKLPSRRALLEGGNRGNPTRPPPRPLKPREYDYDEDDEKENQGPGQEKPPAKEEEEEEEEEERPNWDLHHLLQKWGADIDKLKDKVCRDLDSYKQKLGIRL

SEQ ID NO: 179 - DNA, 3227 bp, Homo sapiens
gctgggcaaagccggtggcaagggcctcccctgccgctgtgccaggcaggcagtgccaaatccggggagcctggagctggggggagggccggggacagcccggccctgccccctcccccgctgggagcccagcaacttctgaggaaagtttggcacccatggcgtggcggtgccccaggatgggcagggtcccgctggcctggtgcttggcgctgtgcggctgggcgtgcatggcccccaggggcacgcaggctgaagaaagtcccttcgtgggcaacccagggaatatcacaggtgcccggggactcacgggcacccttcggtgtcagctccaggttcagggagagccccccgaggtacattggcttcgggatggacagatcctggagctcgcggacagcacccagacccaggtgcccctgggtgaggatgaacaggatgactggatagtggtcagccagctcagaatcacctccctgcagctttccgacacgggacagtaccagtgtttggtgtttctgggacatcagaccttcgtgtcccagcctggctatgttgggctggagggcttgccttacttcctggaggagcccgaagacaggactgtggccgccaacacccccttcaacctgagctgccaagctcagggacccccagagcccgtggacctactctggctccaggatgctgtccccctggccacggctccaggtcacggcccccagcgcagcctgcatgttccagggctgaacaagacatcctctttctcctgcgaagcccataacgccaagggggtcaccacatcccgcacagccaccatcacagtgctcccccagcagccccgtaacctccacctggtctcccgccaacccacggagctggaggtggcttggactccaggcctgagcggcatctaccccctgacccactgcaccctgcaggctgtgctgtcagacgatgggatgggcatccaggcgggagaaccagaccccccagaggagcccctcacctcgcaagcatccgtgcccccccatcagcttcggctaggcagcctccatcctcacaccccttatcacatccgcgtggcatgcaccagcagccagggcccctcatcctggacccactggcttcctgtggagacgccggagggagtgcccctgggcccccctaagaacattagtgctacgcggaatgggagccaggccttcgtgcattggcaagagccccgggcgcccctgcagggtaccctgttagggtaccggctggcgtatcaaggccaggacaccccagaggtgctaatggacatagggctaaggcaagaggtgaccctggagctgcagggggacgggtctgtgtccaatctgacagtgtgtgtggcagcctacactgctgctggggatggaccctggagcctcccagtacccctggaggcctggcgcccagtgaaggaaccttcaactcctgccttctcgtggccctggtggtatgtactgctaggagcagtcgtggccgctgcctgtgtcctcatcttggctctcttccttgtccaccggcgaaagaaggagacccgttatggagaagtgtttgaaccaacagtggaaagaggtgaactggtagtcaggtaccgcgtgcgcaagtcctacagtcgtcggaccactgaagctaccttgaacagcctgggcatcagtgaagagctgaaggagaagctgcgggatgtgatggtggaccggcacaaggtggccctggggaagactctgggagagggagagtttggagctgtgatggaaggccagctcaaccaggacgactccatcctcaaggtggctgtgaagacgatgaagattgccatctgcacgaggtcagagctggaggatttcctgagtgaagcggtctgcatgaaggaatttgaccatcccaacgtcatgaggctcatcggtgtctgtttccagggttctgaacgagagagcttcccagcacctgtggtcatcttacctttcatgaaacatggagacctacacagcttcctcctctattcccggctcggggaccagccagtgtacctgcccactcagatgctagtgaagttcatggcagacatcgccagtggcatggagtatctgagtaccaagagattcatacaccgggacctggcggccaggaactgcatgctgaatgagaacatgtccgtgtgtgtggcggacttcgggctctccaagaagatctacaatggggactactaccgccagggacgtatcgccaagatgccagtcaagtggattgccattgagagtctagctgaccgtgtctacaccagcaagagcgatgtgtggtccttcggggtgacaatgtgggagattgccacaagaggccaaaccccatatccgggcgtggagaacagcgagatttatgactatctgcgccagggaaatcgcctgaagcagcctgcggactgtctggatggactgtatgccttgatgtcgcggtgctgggagctaaatccccaggaccggccaagttttacagagctgcgggaagatttggagaacacactgaaggccttgcctcctgcccaggagcctgacgaaatcctctatgtcaacatggatgagggtggaggttatcctgaaccccctggagctgcaggaggagctgaccccccaacccagccagaccctaaggattcctgtagctgcctcactgcggctgaggtccatcctgctggacgctatgtcctctgcccttccacaacccctagccccgctcagcctgctgataggggctccccagcagccccagggcaggaggatggtgcctgagacaaccctccacctggtactccctctcaggatccaagctaagcactgccactggggaaaactccaccttcccacttttccaccccacgccttatccccacttgcagccctgtcttcctacctatcccacctccatcccagacaggtccctccccttctctgtgcagtagcatcaccttgaaagcagtagcatcaccatctgtaaaaggaaggggttggattgcaatatctgaagccctcccaggtgttaacattccaagactctagagtccaaggtttaaagagtctagattcaaaggttctaggtttcaaagatgctgtgagtctttggttctaaggacctgaaattccaaagtctctaattctattaaagtgctaaggttctaaggcaaaaaaaaaaaaaaaaaaaaa

SEQ ID NO: 180 - protein, 885 aa, Homo sapiens [sequence omitted]

SEQ ID NO: 181 - DNA, 3630 bp, Homo sapiens
atacgggagaactaaggctgaaacctcggaggaacaaccacttttgaagtgacttcgcggcgtgcgttgggtgcggactaggtggccccggcgggagtgtgctggagcctgaagtccacgcgcgcggctgagaaccgccgggaccgcacgtgggcgccgcgcgcttcccccgcttcccaggtgggcgccggccgccaggccacctcacgtccggccccggggatgcgcgtcctcctcgccgcgctgggactgctgttcctgggggcgctacgagccttcccacaggatcgacccttcgaggacacctgtcatggaaaccccagccactactatgacaaggctgtcaggaggtgctgttaccgctgccccatggggctgttcccgacacagcagtgcccacagaggcctactgactgcaggaagcagtgtgagcctgactactacctggatgaggccgaccgctgtacagcctgcgtgacttgttctcgagatgacctcgtggagaagacgccgtgtgcatggaactcctcccgtgtctgcgaatgtcgacccggcatgttctgttccacgtctgccgtcaactcctgtgcccgctgcttcttccattctgtctgtccggcagggatgattgtcaagttcccaggcacggcgcagaagaacacggtctgtgagccggcttccccaggggtcagccctgcctgtgccagcccagagaactgcaaggaaccctccagtggcaccatcccccaggccaagcccaccccggtgtccccagcaacctccagtgccagcaccatgcctgtaagagggggcacccgcctcgcccaggaagctgcttctaaactgacgagggctcccgactctccctcctctgtgggaaggcctagttcagatccaggtctgtccccaacacagccatgcccagaggggtctggtgattgcagaaagcagtgtgagcccgactactacctggacgaggccggccgctgcacagcctgcgtgagctgttctcgagatgaccttgtggagaagacgccatgtgcatggaactcctcccgcacctgcgaatgtcgacctggcatgatctgtgccacatcagccaccaactcctgtgcccgctgtgtcccctacccaatctgtgcagcagagacggtcaccaagccccaggatatggctgagaaggacaccacctttgaggcgccacccctggggacccagccggactgcaaccccaccccagagaatggcgaggcgcctgccagcaccagccccactcagagcttgctggtggactcccaggccagtaagacgctgcccatcccaaccagcgctcccgtcgctctctcctccacggggaagcccgttctggatgcagggccagtgctcttctgggtgatcctggtgttggttgtggtggtcggctccagcgccttcctcctgtgccaccggagggcctgcaggaagcgaattcggcagaagctccacctgtgctacccggtccagacctcccagcccaagctagagcttgtggattccagacccaggaggagctcaacgcagctgaggagtggtgcgtcggtgacagaacccgtcgcggaagagcgagggttaatgagccagccactgatggagacctgccacagcgtgggggcagcctacctggagagcctgccgctgcaggatgccagcccggccgggggcccctcgtcccccagggaccttcctgagccccgggtgtccacggagcacaccaataacaagattgagaaaatctacatcatgaaggctgacaccgtgatcgtggggaccgtgaaggctgagctgccggagggccggggcctggcggggccagcagagcccgagttggaggaggagctggaggcggaccataccccccactaccccgagcaggagacagaaccgcctctgggcagctgcagcgatgtcatgctctcagtggaagaggaagggaaagaagaccccttgcccacagctgcctctggaaagtgaggcctgggctgggctggggctaggagggcagcagggtggcctctgggaggccaggatggcactgttggcaccgaggttgggggcagaggcccatctggcctgaactgaggctccagcatctagtggtggaccggccggtcactgcaggggtctggtggtctctgcttgcatccccaacttagctgtcccctgacccagagcctaggggatccggggcttgtacagaagagacagtccaaggggactggatcccagcagtgatgttggttgaggcagcaaacagatggcaggatgggcactgccgagaacagcattggtcccagagccctgggcatcagaccttaaccaccaggcccacagcccagcgagggagaggtcgtgaggccagctcccggggcccctgtaaccctactctcctctctccctggacctcagaggtgacacccattgggcccttccggcatgcccccagttactgtaaatgtggcccccagtgggcatggagccagtgcctgtggttgtttctccagagtcaaaagggaagtcgagggatggggcgtcgtcagctggcactgtctctgctgcagcggccacactgtactctgcactggtgtgagggcccctgcctggactgtgggaccctcctggtgctgcccaccttccctgtcctgtagccccctcggtgggcccagggcctaggggcccaggatcaagtcactcatctcagaatgtccccaccaatccccgccacagcaggcgcctcgggtcccagatgtctgcagccctcagcagctgcagaccgcccctcaccaacccagagaacctgctttactttgcccagggacttcctccccatgtgaacatggggaacttcgggccctgcctggagtccttgaccgctctctgtgggccccacccactctgtcctgggaaatgaagaagcatcttccttaggtctgccctgcttgcaaatccactagcaccgaccccaccacctggttccggctctgcacgctttggggtgtggatgtcgagaggcaccacggcctcacccaggcatctgctttactctggaccataggaaacaagaccgtttggaggtttcatcaggattttgggtttttcacatttcacgctaaggagtagtggccctgacttccggtcggctggccagctgactccctagggccttcagacgtgtatgcaaatgagtgatggataaggatgagtcttggagttgcgggcagcctggagactcgtggacttaccgcctggaggcaggcccgggaaggctgctgtttactcatcgggcagccacgtgctctctggaggaagtgatagtttctgaaaccgctcagatgttttggggaaagttggagaagccgtggccttgcgagaggtggttacaccagaacctggacattggccagaagaagcttaagtgggcagacactgtttgcccagtgtttgtgcaaggatggagtgggtgtctctgcatcacccacagccgcagctgtaaggcacgctggaaggcacacgcctgccaggcagggcagtctggcgcccatgatgggagggattgacatgtttcaacaaaataatgcacttccttaaaaaaaa

SEQ ID NO: 182 - protein, 595 aa, Homo sapiens
MRVLLAALGLLFLGALRAFPQDRPFEDTCHGNPSHYYDKAVRRCCYRCPMGLFPTQQCPQRPTDCRKQCEPDYYLDEADRCTACVTCSRDDLVEKTPCAWNSSRVCECRPGMFCSTSAVNSCARCFFHSVCPAGMIVKFPGTAQKNTVCEPASPGVSPACASPENCKEPSSGTIPQAKPTPVSPATSSASTMPVRGGTRLAQEAASKLTRAPDSPSSVGRPSSDPGLSPTQPCPEGSGDCRKQCEPDYYLDEAGRCTACVSCSRDDLVEKTPCAWNSSRTCECRPGMICATSATNSCARCVPYPICAAETVTKPQDMAEKDTTFEAPPLGTQPDCNPTPENGEAPASTSPTQSLLVDSQASKTLPIPTSAPVALSSTGKPVLDAGPVLFWVILVLVVVVGSSAFLLCHRRACRKRIRQKLHLCYPVQTSQPKLELVDSRPRRSSTQLRSGASVTEPVAEERGLMSQPLMETCHSVGAAYLESLPLQDASPAGGPSSPRDLPEPRVSTEHTNNKIEKIYIMKADTVIVGTVKAELPEGRGLAGPAEPELEEELEADHTPHYPEQETEPPLGSCSDVMLSVEEEGKEDPLPTAASGK

SEQ ID NO: 183 - DNA, 3802 bp, Homo sapiens
  misc_feature (1064)..(1065): n is a, c, g, or t
  misc_feature (1240)..(1240): n is a, c, g, or t
  misc_feature (1862)..(1862): n is a, c, g, or t
  misc_feature (1878)..(1878): n is a, c, g, or t
  misc_feature (1899)..(1900): n is a, c, g, or t
  misc_feature (1906)..(1906): n is a, c, g, or t
  misc_feature (1917)..(1917): n is a, c, g, or t
  misc_feature (1928)..(1929): n is a, c, g, or t
  misc_feature (2395)..(2395): n is a, c, g, or t
cccctgcagctggcctcaatgttaagatcttaaggggcacagcacagaccttgtcttgtctatctccctggcacctctcacagagtacagcttattaacagatgttccagaaactgttactgaacaatcggcttgatgctgtgggcttgtctgcatcttgcaactgtcacctggctgagaaatttcttctataaataagcagtttctgtttcagatgtgatatgccctgatatttacaccctgtctcttaccccatccaagactcaaacttagaaacttgaattagatgtggtattcaaatccttacgtgccgcgaagacacagacagcccccgtaagaacccacgaagcaggcgaagttcattgttctcaacattctagctgctcttgctgcatttgctctggaattcttgtagagatattacttgtccttccaggctgttctttctgtagctcccttgttttctttttgtgatcatgttgcagatggctgggcagtgctcccaaaatgaatattttgacagtttgttgcatgcttgcataccttgtcaacttcgatgttcttctaatactcctcctctaacatgtcagcgttattgtaatgcaagtaagtaatattgcttgaacgattattcattggtgtgaactattctgtctatatggactgcttattcagagaatcaacataatgggcatgatggtgagttttcttgaatcaaaaagagaaaggaagcaaggcagtgattttaatgtttatggaaacaaagtaattatttggaactgaacttgatatgattcagcactattagcaacatagattttttttaaaaatcagctcttctaattaagtgatatttagaatttaaaagtcaatgttcattaattaaggtgattgaatggaaataatccatacttgattattttgctatcaaaacaatccataattcattatttttagcaaaataatcaagtatgacagccgggtgcggtggatggctcacacctgtaatcccagcactttgggaggccgagatgggtgaatcacctgaggtcggcagtttgagnncagcctggccaacctggtgaaaccctgtctctactaaaaatacaaaaaattagctgggcatggtggcacaggtctgtaatcccagctactcgggaggctgaggcaggagaatcgtttgaacttgggaggtggaggttgcagtgagccgagatcgcgccactgcaactctagcctnggcaacagagcaagactttgtctcaaaataaataaataaataataacaataaagtatgtgaatattatgttatcagctcattatctgtctgatgttcttttcataaaggtgtgaccaattcagtgaaaggaacgaatgcgattctctggacctgtttgggactgagcttaataatttctttggcagttttcgtgctaatgtttttgctaaggaagataagctctgaaccattaaaggacgagtttaaaaacacaggttggtttgatggtgaatctttgaaatctatttccaggggatggctattgtgagtttcagttccttttctttttttagcgttgactatttcacttcgttacagccctttcgaatgtgttagaacattgttacattaaatgaacttggtagaggtgagccatcttcattctgattttgacaccttggcagattttctacaatgtcagtcttctccaggattcttccactgttaattactctattgaaagtactaaggctttcttgggaaacatcagtctctttgactaaagttagcacatcgattaaatgccacattatcagaaactcctagccaggtctgctactgtcaggaaaagcatatttgtcnagatctatggtcakgnttttatacaaatataggtgtnnyttgcntgagtgaacantttactactgnnaaaatgttagaaatgaataaccagttgctcctgaattatttgaggaatcatctaaaaaataattatttttaagcaatagagaaccagtcccagaaaaatgaatgttctacttaagtgcctcttaagataaaaaatacttctgcagcacctttgctcatgattggattcccaagcatgtacagccactgccctatttctgtatgcatttatttatttatttatttatttatttatttagagatggagtctcgctctgtggcccaaggctggagtgcagtggcgtgatctcaactcactgcagcctctgcctcttgggttcaaacaattctcccatctcagcctcctgagtaactggactataggtatgtgccatcacctccgactaatttttgtactttttggtagagacagggtttcatcatgttggccaggatggtctcaagctcctgaccacaagtgatctgcncgcctcagcttcccaaagtgctgggattacaggcgtgagccacagggcccagcacatactcattcttttttactgaaaagatctgtttcaagctgggtgttggtggctatggagctgtagtccgactgctctgtaggctaacgtgggaggattgcttgagcccagagtttgaatgcagcctgggcaacacagtaagaccccacctctaaaaaatgaaaaaatctctctcacattgctttgagtcccgatgtgtactgctaagactctcatgaccacattctctgtgaagtttgggttaagttccgttctacataattaggatcaggtctcctgggcatggctaacattgacctggaaaagagcaggactggtgatgaaattattcttccgagaggcctcgagtacacggtggaagaatgcacctgtgaagactgcatcaagagcaaaccgaaggtcgactctgaccattgctttccactcccagctatggaggaaggcgcaaccattcttgtcaccacgaaaacgaatgactattgcaagagcctgccagctgctttgagtgctacggagatagagaaatcaatttctgctaggtaattaaccatttcgactcgagcagtgccactttaaaaatcttttgtcagaatagatgatgtgtcagatctctttaggatgactgtatttttcagttgccgatacagctttttgtcctctaactgtggaaactctttatgttagatatatttctctaggttactgttgggagcttaatggtagaaacttccttggtttcatgattaaagtctttttttttcctgacatctaagtttttattaacgtgagtttttaaaaacaagcatgtataccagtgtggggggtgagggtgggagagaaaggtgggagggggaaagaattctaacctattgataataaagctccagttttggccaggcgcggtgctcatgcctgtaatcccagcactttgaaaggccgaggcgggcagattacctgaggtcaggaatttgagaccagcctggccaacatggtgaaaccctgtctttactaaaaatacaaaaattagctgggcatggtggtaggcacctgtaatcccagctactcaggaggctgaggcaggagaatcgcttgaacctgggaggtggaggttgcaatgagctgagatagcatccctgcactccagcctgggcaagagggtgagactccgtctcaaaacaaaacaacacaaacaaacaaaaagtacctccagcttcatcttctgctggattttatagcgcccccaaagatatgtggtccttaaaaattgtataccacttattcaggagtcttgttcctgaaagggttgttcttgttacagccctagtctgggctgtaatcagcttcttaaggtcc

SEQ ID NO: 184 - protein, 184 aa, Homo sapiens [sequence omitted]

SEQ ID NO: 185 - DNA, 2607 bp, Homo sapiens
tctgttcccacttcctccccgccccaggaaacctgccatggcctcctggtgagctgtcctcatccactgctcgctgcctctccagatcttcagttgcttcaggccatttgaacgtatatgagccggtcgtaggggatatgatggcttagcttgggctcagaggcctgaaaatcgcccccaccaatcacctgtttcccccaatctaccctcctgaaggtcactgacaaagacttcattgtctcctaggagaggctgccatatatccagggctgacgtaattccatcttaatatcagttacattataaaaatttacctcgtgcctgaggccccagagcccaagggtgcaaagcagtaattggtcaaagttcaacttccctcccactctgggctcaggctgtcccctgagggcctgtgttttgagtctctttccagaaccttggtgtgaacttaggtcttggcgtcgggatcccttttcgtcacactcaggtgacctacagggagctccgctcgacactgcaaggcttagaccagttcggtccaacagagaaagcaggcaaccaccatgtcatttgaaaacagtttcatcgggatataattcgcaacccatacagtgaatccatttaagatactctgacccatggatcccctgggtgcagccaagccacaatggccatggcgccgctgtctggccgcactgctatttcagctgctggtggctgtgtgtttcttctcctacctgcgtgtgtcccgagacgatgccactggatcccctagggctcccagtgggtcctcccgacaggacaccactcccacccgccccaccctcctgatcctgctatggacatggcctttccacatccctgtggctctgtcccgctgttcagagatggtgcccggcacagccgactgccacatcactgccgaccgcaaggtgtacccacaggcagacacggtcatcgtgcaccactgggatatcatgtccaaccctaagtcacgcctcccaccttccccgaggccgcaggggcagcgctggatctggttcaacttggagccaccccctaactgccagcacctggaagccctggacagatacttcaatctcaccatgtcctaccgcagcgactccgacatcttcacgccctacggctggctggagccgtggtccggccagcctgcccacccaccgctcaacctctcggccaagaccgagctggtggcctgggcggtgtccaactggaagccggactcagccagggtgcgctactaccagagcctgcaggctcatctcaaggtggacgtgtacggacgctcccacaagcccctgcccaaggggaccatgatggagacgctgtcccggtacaagttctacctggccttcgagaactccttgcaccccgactacatcaccgagaagctgtggaggaacgccctggaggcctgggccgtgcccgtggtgctgggccccagcagaagcaactacgagaggttcctgccacccgacgccttcatccacgtggacgacttccagagccccaaggacctggcccggtacctgcaggagctggacaaggaccacgcccgctacctgagctactttcgctggcgggagacgctgcggcctcgctccttcagctgggcactggatttctgcaaggcctgctggaaactgcagcaggaatccaggtaccagacggtgcgcagcatagcggcttggttcacctgagaggccggcatggtgcctgggctgccgggaacctcatctgcctggggcctcacctgctggagtcctttgtggccaaccctctctcttacctgggacctcacacgctgggcttcacggctgccaggagcctctcccctccagaagacttgcctgctagggacctcgcctgctggggacctcgcctgttggggacctcacctgctggggacctcacctgctggggaccttggctgctggaggctgcacctactgaggatgtcggcggtcggggactttacctgctgggacctgctcccagagaccttgccacactgaatctcacctgctggggacctcaccctggagggccctgggccctggggaactggcttacttggggccccacccgggagtgatggttctggctgatttgtttgtgatgttgttagccgcctgtgaggggtgcagagagatcatcacggcacggtttccagatgtaatactgcaaggaaaaatgatgacgtgtctcctcactctagaggggttggtcccatgggttaagagctcaccccaggttctcacctcaggggttaagagctcagagttcagacaggtccaagttcaagcccaggaccaccacttatagggtacaggtgggatcgactgtaaatgaggacttctggaacattccaaatattctggggttgagggaaattgctgctgtctacaaaatgccaagggtggacaggcgctgtggctcacgcctgtaatcccagcactttgggaggctgaggtaggaggattgattgaggccaagagttaaagaccagcctggtcaatatagcaagaccacgtctctaaataaaaaataataggccggccaggcaaaaaaaaaaaaaaaaaa

SEQ ID NO: 186 - protein, 361 aa, Homo sapiens
MDPLGAAKPQWPWRRCLAALLFQLLVAVCFFSYLRVSRDDATGSPRAPSGSSRQDTTPTRPTLLILLWTWPFHIPVALSRCSEMVPGTADCHITADRKVYPQADTVIVHHWDIMSNPKSRLPPSPRPQGQRWIWFNLEPPPNCQHLEALDRYFNLTMSYRSDSDIFTPYGWLEPWSGQPAHPPLNLSAKTELVAWAVSNWKPDSARVRYYQSLQAHLKVDVYGRSHKPLPKGTMMETLSRYKFYLAFENSLHPDYITEKLWRNALEAWAVPVVLGPSRSNYERFLPPDAFIHVDDFQSPKDLARYLQELDKDHARYLSYFRWRETLRPRSFSWALDFCKACWKLQQESRYQTVRSIAAWFT

SEQ ID NO: 187 - DNA, 2371 bp, Homo sapiens
tctcctcttgctctaagcagggtgtttgaccttctagtcgactgcgtcccctgtacccggcgccagctgtgttcctgaccccagaataactcagggctgcaccgggcctggcagcgctccgcacacatttcctgtcgcggcctaagggaaactgttggccgctgggcccgcggggggattcttggcagttggggggtccgtcgggagcgagggcggaggggaagggagggggaaccgggttggggaagccagctgtagagggcggtgaccgcgctccagacacagctctgcgtcctcgagcgggacagatccaagttgggagcagctctgcgtgcggggcctcagagaatgaggccggcgttcgccctgtgcctcctctggcaggcgctctggcccgggccgggcggcggcgaacaccccactgccgaccgtgctggctgctcggcctcgggggcctgctacagcctgcaccacgctaccatgaagcggcaggcggccgaggaggcctgcatcctgcgaggtggggcgctcagcaccgtgcgtgcgggcgccgagctgcgcgctgtgctcgcgctcctgcgggcaggcccagggcccggagggggctccaaagacctgctgttctgggtcgcactggagcgcaggcgttcccactgcaccctggagaacgagcctttgcggggtttctcctggctgtcctccgaccccggcggtctcgaaagcgacacgctgcagtgggtggaggagccccaacgctcctgcaccgcgcggagatgcgcggtactccaggccaccggtggggtcgagcccgcaggctggaaggagatgcgatgccacctgcgcgccaacggctacctgtgcaagtaccagtttgaggtcttgtgtcctgcgccgcgccccggggccgcctctaacttgagctatcgcgcgcccttccagctgcacagcgccgctctggacttcagtccacctgggaccgaggtgagtgcgctctgccggggacagctcccgatctcagttacttgcatcgcggacgaaatcggcgctcgctgggacaaactctcgggcgatgtgttgtgtccctgccccgggaggtacctccgtgctggcaaatgcgcagagctccctaactgcctagacgacttgggaggctttgcctgcgaatgtgctacgggcttcgagctggggaaggacggccgctcttgtgtgaccagtggggaaggacagccgacccttggggggaccggggtgcccaccaggcgcccgccggccactgcaaccagccccgtgccgcagagaacatggccaatcagggtcgacgagaagctgggagagacaccacttgtccctgaacaagacaattcagtaacatctattcctgagattcctcgatggggatcacagagcacgatgtctacccttcaaatgtcccttcaagccgagtcaaaggccactatcaccccatcagggagcgtgatttccaagtttaattctacgacttcctctgccactcctcaggctttcgactcctcctctgccgtggtcttcatatttgtgagcacagcagtagtagtgttggtgatcttgaccatgacagtactggggcttgtcaagctctgctttcacgaaagcccctcttcccagccaaggaaggagtctatgggcccgccgggcctggagagtgatcctgagcccgctgctttgggctccagttctgcacattgcacaaacaatggggtgaaagtcggggactgtgatctgcgggacagagcagagggtgccttgctggcggagtcccctcttggctctagtgatgcatagggaaacaggggacatgggcactcctgtgaacagtttttcacttttgatgaaacggggaaccaagaggaacttacttgtgtaactgacaatttctgcagaaatcccccttcctctaaattccctttactccactgaggagctaaatcagaactgcacactccttccctgatgatagaggaagtggaagtgcctttaggatggtgatactgggggaccgggtagtgctggggagagatattttcttatgtttattcggagaatttggagaagtgattgaacttttcaagacattggaaacaaatagaacacaatataatttacattaaaaaataatttctaccaaaatggaaaggaaatgttctatgttgttcaggctaggagtatattggttcgaaatcccagggaaaaaaataaaaataaaaaattaaaggattgttgataacccagactcaaatatcattgccttcctccaggagtaattaggaacagctgagggcatgctgggagtaagcagcaagagtgcattctgcttttagattgagggagaggt

SEQ ID NO: 188 - protein, 490 aa, Homo sapiens
MRPAFALCLLWQALWPGPGGGEHPTADRAGCSASGACYSLHHATMKRQAAEEACILRGGALSTVRAGAELRAVLALLRAGPGPGGGSKDLLFWVALERRRSHCTLENEPLRGFSWLSSDPGGLESDTLQWVEEPQRSCTARRCAVLQATGGVEPAGWKEMRCHLRANGYLCKYQFEVLCPAPRPGAASNLSYRAPFQLHSAALDFSPPGTEVSALCRGQLPISVTCIADEIGARWDKLSGDVLCPCPGRYLRAGKCAELPNCLDDLGGFACECATGFELGKDGRSCVTSGEGQPTLGGTGVPTRRPPATATSPVPQRTWPIRVDEKLGETPLVPEQDNSVTSIPEIPRWGSQSTMSTLQMSLQAESKATITPSGSVISKFNSTTSSATPQAFDSSSAVVFIFVSTAVVVLVILTMTVLGLVKLCFHESPSSQPRKESMGPPGLESDPEPAALGSSSAHCTNNGVKVGDCDLRDRAEGALLAESPLGSSDA

SEQ ID NO: 189 - DNA, 3973 bp, Homo sapiens
gggctgggggagggtatataagccgagtaggcgacggtgaggtcgacgccggccaagacagcacagacagattgacctattggggtgtttcgcgagtgtgagagggaagcgccgcggcctgtatttctagacctgcccttcgcctggttcgtggcgccttgtgaccccgggcccctgccgcctgcaagtcggaaattgcgctgtgctcctgtgctacggcctgtggctggactgcctgctgctgcccaactggctggcaagatgaagctctccctggtggccgcgatgctgctgctgctcagcgcggcgcgggccgaggaggaggacaagaaggaggacgtgggcacggtggtcggcatcgacctggggaccacctactcctgcgtcggcgtgttcaagaacggccgcgtggagatcatcgccaacgatcagggcaaccgcatcacgccgtcctatgtcgccttcactcctgaaggggaacgtctgattggcgatgccgccaagaaccagctcacctccaaccccgagaacacggtctttgacgccaagcggctcatcggccgcacgtggaatgacccgtctgtgcagcaggacatcaagttcttgccgttcaaggtggttgaaaagaaaactaaaccatacattcaagttgatattggaggtgggcaaacaaagacatttgctcctgaagaaatttctgccatggttctcactaaaatgaaagaaaccgctgaggcttatttgggaaagaaggttacccatgcagttgttactgtaccagcctattttaatgatgcccaacgccaagcaaccaaagacgctggaactattgctggcctaaatgttatgaggatcatcaacgagcctacggcagctgctattgcttatggcctggataagagggagggggagaagaacatcctggtgtttgacctgggtggcggaaccttcgatgtgtctcttctcaccattgacaatggtgtcttcgaagttgtggccactaatggagatactcatctgggtggagaagactttgaccagcgtgtcatggaacacttcatcaaactgtacaaaaagaagacgggcaaagatgtcaggaaagacaatagagctgtgcagaaactccggcgcgaggtagaaaaggccaaacgggccctgtcttctcagcatcaagcaagaattgaaattgagtccttctatgaaggagaagacttttctgagaccctgactcgggccaaatttgaagagctcaacatggatctgttccggtctactatgaagcccgtccagaaagtgttggaagattctgatttgaagaagtctgatattgatgaaattgttcttgttggtggctcgactcgaattccaaagattcagcaactggttaaagagttcttcaatggcaaggaaccatcccgtggcataaacccagatgaagctgtagcgtatggtgctgctgtccaggctggtgtgctctctggtgatcaagatacaggtgacctggtactgcttgatgtatgtccccttacacttggtattgaaactgtgggaggtgtcatgaccaaactgattccaaggaacacagtggtgcctaccaagaagtctcagatcttttctacagcttctgataatcaaccaactgttacaatcaaggtctatgaaggtgaaagacccctgacaaaagacaatcatcttctgggtacatttgatctgactggaattcctcctgctcctcgtggggtcccacagattgaagtcacctttgagatagatgtgaatggtattcttcgagtgacagctgaagacaagggtacagggaacaaaaataagatcacaatcaccaatgaccagaatcgcctgacacctgaagaaatcgaaaggatggttaatgatgctgagaagtttgctgaggaagacaaaaagctcaaggagcgcattgatactagaaatgagttggaaagctatgcctattctctaaagaatcagattggagataaagaaaagctgggaggtaaactttcctctgaagataaggagaccatggaaaaagctgtagaagaaaagattgaatggctggaaagccaccaagatgctgacattgaagacttcaaagctaagaagaaggaactggaagaaattgttcaaccaattatcagcaaactctatggaagtgcaggccctcccccaactggtgaagaggatacagcagaaaaagatgagttgtagacactgatctgctagtgctgtaatattgtaaatactggactcaggaacttttgttaggaaaaaattgaaagaacttaagtctcgaatgtaattggaatcttcacctcagagtggagttgaaactgctatagcctaagcggctgtttactgcttttcattagcagttgctcacatgtctttgggtgggggggagaagaagaattggccatcttaaaaagcgggtaaaaaacctgggttagggtgtgtgttcaccttcaaaatgttctatttaacaactgggtcatgtgcatctggtgtaggaagttttttctaccataagtgacaccaataaatgtttgttatttacactggtctaatgtttgtgagaagcttctaattagatcaattacttattttaggaaatttaagactagatactcgtgtgtggggtgaggggagggagtatttggtatgttgggataaggaaacacttctatttaatgcttccagggatttttttttttttttttaaccctcctgggcccaagtgatccttccacctcagtctcccagctaattgagaccacaggcttgttaccaccatgctcggcttttgcattaatctaagaaaaggggagagaagttaatccacatctttactcaggcaaggggcatttcacagtgcccaagagtggggttttcttgaacatacttggtttcctatttccccttatctttctaaaactgcctttctggtggctttttttaaaattattactaatgatgcttttatagctgcttggattctctgagaaatgatggggagtgagtgatcactggtattaactttatacacttggatttcatttgtaactttaggatgtaaaggtatattgtgaaccctagctgtgtcagaatctccatccctgaaatttctcattagtggtactggggtgggatcttggatggtgacattgaaactacactaaatcccctcactatgaatgggttgttaaaggcaatggtttgtgtcaaaactggtttaggattacttagattgtgttcctgaagaaaagagtccaggtaaatggtatgatcaataaaggacaggctggtgctaacataaaatccaatattgtaatcctagcactttgggaggccaaggcgggtggatcacaaggtcaagagatagagaccatctttgccaacatggtgaaactccatctctactgaaaatacaaaaattagctgggcgtggtagtgcaagctgaaggctgaggcaggagaatcactcgaacccgggaggcagaggttgcagtgagccgagatcacaccactgtactccagcccggcactccagcctggcgacaagagtgagactccacctcaaaaaaaaaaaaaagaatccaatactgcccaaggataggtattttatagatgggcaactggctgaaaggttaattctctagggctagtagaactggatcccaacaccaaactcttaattagacctaggcctcagctgcactgcccgaaaagcatttgggcagaccctgagcagaatactggtctcaggccaagcccaatacagccattaaagatgacctacagtgctgtgtaccctggggcaatagggttaaatggtagttagcaactagggctagtcttcccttacctcaaaggctctcactaccgtggaccacctagtctgtaactctttctgaggagctgttactgaatattaaaaagatagacttcaactatgaaa

SEQ ID NO: 190 - protein, 654 aa, Homo sapiens
MKLSLVAAMLLLLSAARAEEEDKKEDVGTVVGIDLGTTYSCVGVFKNGRVEIIANDQGNRITPSYVAFTPEGERLIGDAAKNQLTSNPENTVFDAKRLIGRTWNDPSVQQDIKFLPFKVVEKKTKPYIQVDIGGGQTKTFAPEEISAMVLTKMKETAEAYLGKKVTHAVVTVPAYFNDAQRQATKDAGTIAGLNVMRIINEPTAAAIAYGLDKREGEKNILVFDLGGGTFDVSLLTIDNGVFEVVATNGDTHLGGEDFDQRVMEHFIKLYKKKTGKDVRKDNRAVQKLRREVEKAKRALSSQHQARIEIESFYEGEDFSETLTRAKFEELNMDLFRSTMKPVQKVLEDSDLKKSDIDEIVLVGGSTRIPKIQQLVKEFFNGKEPSRGINPDEAVAYGAAVQAGVLSGDQDTGDLVLLDVCPLTLGIETVGGVMTKLIPRNTVVPTKKSQIFSTASDNQPTVTIKVYEGERPLTKDNHLLGTFDLTGIPPAPRGVPQIEVTFEIDVNGILRVTAEDKGTGNKNKITITNDQNRLTPEEIERMVNDAEKFAEEDKKLKERIDTRNELESYAYSLKNQIGDKEKLGGKLSSEDKETMEKAVEEKIEWLESHQDADIEDFKAKKKELEEIVQPIISKLYGSAGPPPTGEEDTAEKDEL

SEQ ID NO: 191 - DNA, 926 bp, Homo sapiens
ccagagaggggcaggcttgtcccctgacaggttgaagcaagtagacgcccaggagccccgggagggggctgcagtttccttccttccttctcggcagcgctccgcgcccccatcgcccctcctgcgctagcggaggtgatcgccgcggcgatgccggaggagggttcgggctgctcggtgcggcgcaggccctatgggtgcgtcctgcgggctgctttggtcccattggtcgcgggcttggtgatctgcctcgtggtgtgcatccagcgcttcgcacaggctcagcagcagctgccgctcgagtcacttgggtgggacgtagctgagctgcagctgaatcacacaggacctcagcaggaccccaggctatactggcaggggggcccagcactgggccgctccttcctgcatggaccagagctggacaaggggcagctacgtatccatcgtgatggcatctacatggtacacatccaggtgacgctggccatctgctcctccacgacggcctccaggcaccaccccaccaccctggccgtgggaatctgctctcccgcctcccgtagcatcagcctgctgcgtctcagcttccaccaaggttgtaccattgtctcccagcgcctgacgcccctggcccgaggggacacactctgcaccaacctcactgggacacttttgccttcccgaaacactgatgagaccttctttggagtgcagtgggtgcgcccctgaccactgctgctgattagggttttttaaattttattttattttatttaagttcaagagaaaaagtgtacacacaggggccacccggggttggggtgggagtgtggtggggggtagtttgtggcaggacaagagaaggcattgagctttttctttcattttcctattaaaaaatacaaaaatcaaaacaaaaaaaa

SEQ ID NO: 192 - protein, 193 aa, Homo sapiens [sequence omitted]

SEQ ID NO: 193 - protein, 293 aa, Homo sapiens
MGILPFLLIPMESNWTVHVFSRTLCHMLLWTAVLNLAAGTHDLPKAVVKLEPPWIQVLKEDTVTLTCEGTHNPGNSSTQWFHNGRSIRSQVQASYTFKATVNDSGEYRCQMEQTRLSDPVDLGVISDWLLLQTPQLVFLEGETITLRCHSWRNKLLNRISFFHNEKSVRYHHYSSNFSIPKANHSHSGDYYCKGSLGRTQHQSKTVTITVQGPKSSRSLPVLTIVAAVTGIAVAAIVIILVSLVYLKKKQVPDNPPDLEEAAKTEAENTITYSLLKHPEALDEETEHDYQNHI

SEQ ID NO: 194 - DNA, 2880 bp, Homo sapiens
tgctgctctccgcccgcgtccggctcgtggccccctacttcgggcaccatggacacctcccggctcggtgtgctcctgtccttgcctgtgctgctgcagctggcgaccgggggcagctctcccaggtctggtgtgttgctgaggggctgccccacacactgtcattgcgagcccgacggcaggatgttgctcagggtggactgctccgacctggggctctcggagctgccttccaacctcagcgtcttcacctcctacctagacctcagtatgaacaacatcagtcagctgctcccgaatcccctgcccagtctccgcttcctggaggagttacgtcttgcgggaaacgctctgacatacattcccaagggagcattcactggcctttacagtcttaaagttcttatgctgcagaataatcagctaagacacgtacccacagaagctctgcagaatttgcgaagccttcaatccctgcgtctggatgctaaccacatcagctatgtgcccccaagctgtttcagtggcctgcattccctgaggcacctgtggctggatgacaatgcgttaacagaaatccccgtccaggcttttagaagtttatcggcattgcaagccatgaccttggccctgaacaaaatacaccacataccagactatgcctttggaaacctctccagcttggtagttctacatctccataacaatagaatccactccctgggaaagaaatgctttgatgggctccacagcctagagactttagatttaaattacaataaccttgatgaattccccactgcaattaggacactctccaaccttaaagaactaggatttcatagcaacaatatcaggtcgatacctgagaaagcatttgtaggcaacccttctcttattacaatacatttctatgacaatcccatccaatttgttgggagatctgcttttcaacatttacctgaactaagaacactgactctgaatggtgcctcacaaataactgaatttcctgatttaactggaactgcaaacctggagagtctgactttaactggagcacagatctcatctcttcctcaaaccgtctgcaatcagttacctaatctccaagtgctagatctgtcttacaacctattagaagatttacccagtttttcagtctgccaaaagcttcagaaaattgacctaagacataatgaaatctacgaaattaaagttgacactttccagcagttgcttagcctccgatcgctgaatttggcttggaacaaaattgctattattcaccccaatgcattttccactttgccatccctaataaagctggacctatcgtccaacctcctgtcgtcttttcctataactgggttacatggtttaactcacttaaaattaacaggaaatcatgccttacagagcttgatatcatctgaaaactttccagaactcaaggttatagaaatgccttatgcttaccagtgctgtgcatttggagtgtgtgagaatgcctataagatttctaatcaatggaataaaggtgacaacagcagtatggacgaccttcataagaaagatgctggaatgtttcaggctcaagatgaacgtgaccttgaagatttcctgcttgactttgaggaagacctgaaagcccttcattcagtgcagtgttcaccttccccaggccccttcaaaccctgtgaacacctgcttgatggctggctgatcagaattggagtgtggaccatagcagttctggcacttacttgtaatgctttggtgacttcaacagttttcagatcccctctgtacatttcccccattaaactgttaattggggtcatcgcagcagtgaacatgctcacgggagtctccagtgccgtgctggctggtgtggatgcgttcacttttggcagctttgcacgacatggtgcctggtgggagaatggggttggttgccatgtcattggttttttgtccatttttgcttcagaatcatctgttttcctgcttactctggcagccctggagcgtgggttctctgtgaaatattctgcaaaatttgaaacgaaagctccattttctagcctgaaagtaatcattttgctctgtgccctgctggccttgaccatggccgcagttcccctgctgggtggcagcaagtatggcgcctcccctctctgcctgcctttgccttttggggagcccagcaccatgggctacatggtcgctctcatcttgctcaattccctttgcttcctcatgatgaccattgcctacaccaagctctactgcaatttggacaagggagacctggagaatatttgggactgctctatggtaaaacacattgccctgttgctcttcaccaactgcatcctaaactgccctgtggctttcttgtccttctcctctttaataaaccttacatttatcagtcctgaagtaattaagtttatccttctggtggtagtcccacttcctgcatgtctcaatccccttctctacatcttgttcaatcctcactttaaggaggatctggtgagcctgagaaagcaaacctacgtctggacaagatcaaaacacccaagcttgatgtcaattaactctgatgatgtcgaaaaacagtcctgtgactcaactcaagccttggtaacctttaccagctccagcatcacttatgacctgcctcccagttccgtgccatcaccagcttatccagtgactgagagctgccatctttcctctgtggcatttgtcccatgtctctaattaatatgtgaaggaaaatgttttcaaaggttgagaacctgaaaatgtgagattgagtatatcagagcagtaattaataagaagagctgaggtgaaactcggtttaaa

SEQ ID NO: 195 - protein, 907 aa, Homo sapiens
MDTSRLGVLLSLPVLLQLATGGSSPRSGVLLRGCPTHCHCEPDGRMLLRVDCSDLGLSELPSNLSVFTSYLDLSMNNISQLLPNPLPSLRFLEELRLAGNALTYIPKGAFTGLYSLKVLMLQNNQLRHVPTEALQNLRSLQSLRLDANHISYVPPSCFSGLHSLRHLWLDDNALTEIPVQAFRSLSALQAMTLALNKIHHIPDYAFGNLSSLVVLHLHNNRIHSLGKKCFDGLHSLETLDLNYNNLDEFPTAIRTLSNLKELGFHSNNIRSIPEKAFVGNPSLITIHFYDNPIQFVGRSAFQHLPELRTLTLNGASQITEFPDLTGTANLESLTLTGAQISSLPQTVCNQLPNLQVLDLSYNLLEDLPSFSVCQKLQKIDLRHNEIYEIKVDTFQQLLSLRSLNLAWNKIAIIHPNAFSTLPSLIKLDLSSNLLSSFPITGLHGLTHLKLTGNHALQSLISSENFPELKVIEMPYAYQCCAFGVCENAYKISNQWNKGDNSSMDDLHKKDAGMFQAQDERDLEDFLLDFEEDLKALHSVQCSPSPGPFKPCEHLLDGWLIRIGVWTIAVLALTCNALVTSTVFRSPLYISPIKLLIGVIAAVNMLTGVSSAVLAGVDAFTFGSFARHGAWWENGVGCHVIGFLSIFASESSVFLLTLAALERGFSVKYSAKFETKAPFSSLKVIILLCALLALTMAAVPLLGGSKYGASPLCLPLPFGEPSTMGYMVALILLNSLCFLMMTIAYTKLYCNLDKGDLENIWDCSMVKHIALLLFTNCILNCPVAFLSFSSLINLTFISPEVIKFILLVVVPLPACLNPLLYILFNPHFKEDLVSLRKQTYVWTRSKHPSLMSINSDDVEKQSCDSTQALVTFTSSSITYDLPPSSVPSPAYPVTESCHLSSVAFVPCL

SEQ ID NO: 196 - DNA, 3977 bp, Homo sapiens
ggatggtgccttgagtgaatgacccccttggagaacattcttccgcatccctcgcctcaagccagcctcagacagaaaactgaagattcagcagatccagtgcttcctgctcctcttctgcccaggaacacgcttgccttccccaaggcttccagaagctctgaggcaggaggcaccaagttctacctcatgtttggaggatcttgctagctatggccctcgtactcggctccctgttgctgctggggctgtgcgggaactccttttcaggagggcagccttcatccacagatgctcctaaggcttggaattatgaattgcctgcaacaaattatgagacccaagactcccataaagctggacccattggcattctctttgaactagtgcatatctttctctatgtggtacagccgcgtgatttcccagaagatactttgagaaaattcttacagaaggcatatgaatccaaaattgattatgacaagccagaaactgtaatcttaggtctaaagattgtctactatgaagcagggattattctatgctgtgtcctggggctgctgtttattattctgatgcctctggtggggtatttcttttgtatgtgtcgttgctgtaacaaatgtggtggagaaatgcaccagcgacagaaggaaaatgggcccttcctgaggaaatgctttgcaatctccctgttggtgatttgtataataataagcattggcatcttctatggttttgtggcaaatcaccaggtaagaacccggatcaaaaggagtcggaaactggcagatagcaatttcaaggacttgcgaactctcttgaatgaaactccagagcaaatcaaatatatattggcccagtacaacactaccaaggacaaggcgttcacagatctgaacagtatcaattcagtgctaggaggcggaattcttgaccgactgagacccaacatcatccctgttcttgatgagattaagtccatggcaacagcgatcaaggagaccaaagaggcgttggagaacatgaacagcaccttgaagagcttgcaccaacaaagtacacagcttagcagcagtctgaccagcgtgaaaactagcctgcggtcatctctcaatgaccctctgtgcttggtgcatccatcaagtgaaacctgcaacagcatcagattgtctctaagccagctgaatagcaaccctgaactgaggcagcttccacccgtggatgcagaacttgacaacgttaataacgttcttaggacagatttggatggcctggtccaacagggctatcaatcccttaatgatatacctgacagagtacaacgccaaaccacgactgtcgtagcaggtatcaaaagggtcttgaattccattggttcagatatcgacaatgtaactcagcgtcttcctattcaggatatactctcagcattctctgtttatgttaataacactgaaagttacatccacagaaatttacctacattggaagagtatgattcatactggtggctgggtggcctggtcatctgctctctgctgaccctcatcgtgattttttactacctgggcttactgtgtggcgtgtgcggctatgacaggcatgccaccccgaccacccgaggctgtgtctccaacaccggaggcgtcttcctcatggttggagttggattaagtttcctcttttgctggatattgatgatcattgtggttcttacctttgtctttggtgcaaatgtggaaaaactgatctgtgaaccttacacgagcaaggaattattccgggttttggatacaccctacttactaaatgaagactgggaatactatctctctgggaagctatttaataaatcaaaaatgaagctcacttttgaacaagtttacagtgactgcaaaaaaaatagaggcacttacggcactcttcacctgcagaacagcttcaatatcagtgaacatctcaacattaatgagcatactggaagcataagcagtgaattggaaagtctgaaggtaaatcttaatatctttctgttgggtgcagcaggaagaaaaaaccttcaggattttgctgcttgtggaatagacagaatgaattatgacagctacttggctcagactggtaaatcccccgcaggagtgaatcttttatcatttgcatatgatctagaagcaaaagcaaacagtttgcccccaggaaatttgaggaactccctgaaaagagatgcacaaactattaaaacaattcaccagcaacgagtccttcctatagaacaatcactgagcactctataccaaagcgtcaagatacttcaacgcacagggaatggattgttggagagagtaactaggattctagcttctctggattttgctcagaacttcatcacaaacaatacttcctctgttattattgaggaaactaagaagtatgggagaacaataataggatattttgaacattatctgcagtggatcgagttctctatcagtgagaaagtggcatcgtgcaaacctgtggccaccgctctagatactgctgttgatgtctttctgtgtagctacattatcgaccccttgaatttgttttggtttggcataggaaaagctactgtatttttacttccggctctaatttttgcggtaaaactggctaagtactatcgtcgaatggattcggaggacgtgtacgatgatgttgaaactatacccatgaaaaatatggaaaatggtaataatggttatcataaagatcatgtatatggtattcacaatcctgttatgacaagcccatcacaacattgatagctgatgttgaaactgcttgagcatcaggatactcaaagtggaaaggatcacagatttttggtagtttctgggtctacaaggactttccaaatccaggagcaacgccagtggcaacgtagtgactcaggcgggcaccaaggcaacggcaccattggtctctgggtagtgctttaagaatgaacacaatcacgttatagtccatggtccatcactattcaaggatgactccctcccttcctgtctatttttgttttttacttttttacactgagtttctatttagacactacaacatatggggtgtttgttcccattggatgcatttctatcaaaactctatcaaatgtgatggctagattctaacatattgccatgtgtggagtgtgctgaacacacaccagtttacaggaaagatgcattttgtgtacagtaaacggtgtatataccttttgttaccacagagttttttaaacaaatgagtattataggactttcttctaaatgagctaaataagtcaccattgacttcttggtgctgttgaaaataatccattttcactaaaagtgtgtgaaacctacagcatattcttcacgcagagattttcatctattatactttatcaaagattggccatgttccacttggaaatggcatgcaaaagcaatcatagagaaacctgcgtaactccatctgacaaattcaaaagagagagagagatcttgagagagaaatgctgttcgttcaaaagtggagttgttttaacagatgccaattacggtgtacagtttaacagagttttctgttgcattaggataaacattaattggagtgcagctaacatgagtatcatcagactagtatcaagtgttctaaaatgaaatatgagaagatcctgtcacaattcttagatctggtgtccagcatggatgaaacctttgagtttggtccctaaatttgcatgaaagcacaaggtaaatattcatttgcttcaggagtttcatgttggatctgtcattatcaaaagtgatcagcaatgaagaactggtcggacaaaatttaacgttgatgtaatgaaattccagatgtaggcattccccccaggtcttttcatgtgcagattgcagttctgattcatttgaataaaaaggaacttggaaaacatg

SEQ ID NO: 197 - protein, 865 aa, Homo sapiens
MALVLGSLLLLGLCGNSFSGGQPSSTDAPKAWNYELPATNYETQDSHKAGPIGILFELVHIFLYVVQPRDFPEDTLRKFLQKAYESKIDYDKPETVILGLKIVYYEAGIILCCVLGLLFIILMPLVGYFFCMCRCCNKCGGEMHQRQKENGPFLRKCFAISLLVICIIISIGIFYGFVANHQVRTRIKRSRKLADSNFKDLRTLLNETPEQIKYILAQYNTTKDKAFTDLNSINSVLGGGILDRLRPNIIPVLDEIKSMATAIKETKEALENMNSTLKSLHQQSTQLSSSLTSVKTSLRSSLNDPLCLVHPSSETCNSIRLSLSQLNSNPELRQLPPVDAELDNVNNVLRTDLDGLVQQGYQSLNDIPDRVQRQTTTVVAGIKRVLNSIGSDIDNVTQRLPIQDILSAFSVYVNNTESYIHRNLPTLEEYDSYWWLGGLVICSLLTLIVIFYYLGLLCGVCGYDRHATPTTRGCVSNTGGVFLMVGVGLSFLFCWILMIIVVLTFVFGANVEKLICEPYTSKELFRVLDTPYLLNEDWEYYLSGKLFNKSKMKLTFEQVYSDCKKNRGTYGTLHLQNSFNISEHLNINEHTGSISSELESLKVNLNIFLLGAAGRKNLQDFAACGIDRMNYDSYLAQTGKSPAGVNLLSFAYDLEAKANSLPPGNLRNSLKRDAQTIKTIHQQRVLPIEQSLSTLYQSVKILQRTGNGLLERVTRILASLDFAQNFITNNTSSVIIEETKKYGRTIIGYFEHYLQWIEFSISEKVASCKPVATALDTAVDVFLCSYIIDPLNLFWFGIGKATVFLLPALIFAVKLAKYYRRMDSEDVYDDVETIPMKNMENGNNGYHKDHVYGIHNPVMTSPSQH

SEQ ID NO: 198 - DNA, 3858 bp, Homo sapiens
ctactttattctgataaaacaggtctatgcagctaccaggacaatggaatctacgttgactttagcaacggaacaacctgttaagaagaacactcttaagaaatataaaatagcttgcattgttcttcttgctttgctggtgatcatgtcacttggattaggcctggggcttggactcaggaaactggaaaagcaaggcagctgcaggaagaagtgctttgatgcatcatttagaggactggagaactgccggtgtgatgtggcatgtaaagaccgaggtgattgctgctgggattttgaagacacctgtgtggaatcaactcgaatatggatgtgcaataaatttcgttgtggagagaccagattagaggccagcctttgctcttgttcagatgactgtttgcagaagaaagattgctgtgctgactataagagtgtttgccaaggagaaacctcatggctggaagaaaactgtgacacagcccagcagtctcagtgcccagaagggtttgacctgccaccagttatcttgttttctatggatggatttagagctgaatatttatacacatgggatactttaatgccaaatatcaataaactgaaaacatgtggaattcattcaaaatacatgagagctatgtatcctaccaaaaccttcccaaatcattacaccattgtcacgggcttgtatccagagtcacatggcatcattgacaataatatgtatgatgtaaatctcaacaagaatttttcactttcttcaaaggaacaaaataatccagcctggtggcatgggcaaccaatgtggctgacagcaatgtatcaaggtttaaaagccgctacctacttttggcccggatcagaagtggctataaatggctcctttccttccatatacatgccttacaacggaagtgtcccatttgaagagaggatttctacactgttaaaatggctggacctgcccaaagctgaaagacccaggttttataccatgtattttgaagaacctgattcctctggacatgcaggtggaccagtcagtgccagagtaattaaagccttacaggtagtagatcatgcttttgggatgttgatggaaggcctgaagcagcggaatttgcacaactgtgtcaatatcatccttctggctgaccatggaatggaccagacttattgtaacaagatggaatacatgactgattattttcccagaataaacttcttctacatgtacgaagggcctgccccccgcatccgagctcataatatacctcatgacttttttagttttaattctgaggaaattgttagaaacctcagttgccgaaaacctgatcagcatttcaagccctatttgactcctgatttgccaaagcgactgcactatgccaagaacgtcagaatcgacaaagttcatctctttgtggatcaacagtggctggctgttaggagtaaatcaaatacaaattgtggaggaggcaaccatggttataacaatgagtttaggagcatggaggctatctttctggcacatggacccagttttaaagagaagactgaagttgaaccatttgaaaatattgaagtctataacctaatgtgtgatcttctacgcattcaaccagcaccaaacaatggaacccatggtagtttaaaccatcttctgaaggtgcctttttatgagccatcccatgcagaggaggtgtcaaagttttctgtttgtggctttgctaatccattgcccacagagtctcttgactgtttctgccctcacctacaaaatagtactcagctggaacaagtgaatcagatgctaaatctcacccaagaagaaataacagcaacagtgaaagtaaatttgccatttgggaggcctagggtactgcagaagaacgtggaccactgtctcctttaccacagggaatatgtcagtggatttggaaaagctatgaggatgcccatgtggagttcatacacagtcccccagttgggagacacatcgcctctgcctcccactgtcccagactgtctgcgggctgatgtcagggttcctccttctgagagccaaaaatgttccttctatttagcagacaagaatatcacccacggcttcctctatcctcctgccagcaatagaacatcagatagccaatatgatgctttaattactagcaatttggtacctatgtatgaagaattcagaaaaatgtgggactacttccacagtgttcttcttataaaacatgccacagaaagaaatggagtaaatgtggttagtggaccaatatttgattataattatgatggccattttgatgctccagatgaaattaccaaacatttagccaacactgatgttcccatcccaacacactactttgtggtgctgaccagttgtaaaaacaagagccacacaccggaaaactgccctgggtggctggatgtcctaccctttatcatccctcaccgacctaccaacgtggagagctgtcctgaaggtaaaccagaagctctttgggttgaagaaagatttacagctcacattgcccgggtccgtgatgtagaacttctcactgggcttgacttctatcaggataaagtgcagcctgtctctgaaattttgcaactaaagacatatttaccaacatttgaaaccactatttaacttaataatgtctacttaatatataatttactgtataaagtaattttggcaaaatataagtgattttttctggagaattgtaaaataaagttttctatttttccttaaaaaaaaaaccggaattccgggcttgggaggctgaggcaggagactcgcttgaacccgggaggcagaggttgcagtgagccaagattgcgccattgcactccagagcctgggtgacagagcaagactacatctcaaaaaataaataaataaaataaaagtaacaataaaaataaaaagaacagcagagagaatgagcaaggagaaatgtcacaaactattgcaaaatactgttacactgggttggctctccaagaagatactggaatctcttcagccatttgcttttcagaagtagaaaccagcaaaccacctctaagcggagaacatacgattctttattaagtagctctggggaaggaaagaataaaagttgatagctccctgattgggaaaaaatgcacaattaataaagaatgaagatgaaagaaagcatgcttatgttgtaacacaaaaaaaattcacaaacgttggtggaaggaaaacagtatagaaaacattactttaactaaaagctggaaaaattttcagttgggatgcgactgacaaaaagaacgggatttccaggcataaagttggcgtgagctacagagggcaccatgtggctcagtggaagacccttcaagattcaaagttccatttgacagagcaaaggcacttcgcaaggagaagggtttaaattatgggtccaaaagccaagtggtaaagcgagcaatttgcagcataactgcttctcctagacagggctgagtgggcaaaatacgacagtacacacagtgactattagccactgccagaaacaggctgaacagccctgggagacaagggaaggcaggtggtgggagttgttcatggagagaaaggagagttttagaaccagcacatccactggagatgctgggccaccagacccctcccagtcaataaagtctggtgcctcatttgatctcagcctcatcatgaccctggagagaccctgataccatctgccagtccccgacagcttaggcactccttgccatcaacctgaccccccgagtggttctccaggctccctgccccacccattcaggccggaattc

SEQ ID NO: 199 - protein, 875 aa, Homo sapiens
MESTLTLATEQPVKKNTLKKYKIACIVLLALLVIMSLGLGLGLGLRKLEKQGSCRKKCFDASFRGLENCRCDVACKDRGDCCWDFEDTCVESTRIWMCNKFRCGETRLEASLCSCSDDCLQKKDCCADYKSVCQGETSWLEENCDTAQQSQCPEGFDLPPVILFSMDGFRAEYLYTWDTLMPNINKLKTCGIHSKYMRAMYPTKTFPNHYTIVTGLYPESHGIIDNNMYDVNLNKNFSLSSKEQNNPAWWHGQPMWLTAMYQGLKAATYFWPGSEVAINGSFPSIYMPYNGSVPFEERISTLLKWLDLPKAERPRFYTMYFEEPDSSGHAGGPVSARVIKALQVVDHAFGMLMEGLKQRNLHNCVNIILLADHGMDQTYCNKMEYMTDYFPRINFFYMYEGPAPRIRAHNIPHDFFSFNSEEIVRNLSCRKPDQHFKPYLTPDLPKRLHYAKNVRIDKVHLFVDQQWLAVRSKSNTNCGGGNHGYNNEFRSMEAIFLAHGPSFKEKTEVEPFENIEVYNLMCDLLRIQPAPNNGTHGSLNHLLKVPFYEPSHAEEVSKFSVCGFANPLPTESLDCFCPHLQNSTQLEQVNQMLNLTQEEITATVKVNLPFGRPRVLQKNVDHCLLYHREYVSGFGKAMRMPMWSSYTVPQLGDTSPLPPTVPDCLRADVRVPPSESQKCSFYLADKNITHGFLYPPASNRTSDSQYDALITSNLVPMYEEFRKMWDYFHSVLLIKHATERNGVNVVSGPIFDYNYDGHFDAPDEITKHLANTDVPIPTHYFVVLTSCKNKSHTPENCPGWLDVLPFIIPHRPTNVESCPEGKPEALWVEERFTAHIARVRDVELLTGLDFYQDKVQPVSEILQLKTYLPTFETTI

SEQ ID NO: 200 - DNA, 585 bp, Homo sapiens
caacgcagagttgggagcaactccagagcctccttcaagatgctgctggtcctgctctcagtggtccttctggctctgagctcagctcagagcacagataatgatgtgaactatgaagactttactttcaccataccagatgtagaggactcaagtcagagaccagatcagggaccccagagacctcctcctgaaggactcctacctagaccccctggtgatagtggtaaccaagatgatggtcctcagcagagaccaccaaaaccaggaggccatcaccgccatcctcccccacctccttttcaaaatcagcaacgaccaccccgacgaggacaccgtcaactctctctaccccgatttccttctgtcagcctgcaggaagcatcatcattcttccagagggacagaccagcaagacatccccaggagcaaccactctggtaatctagaattcagtggcagaaaataaataagaagataacttccttcagaaagccatgacattgaaataatgtggtcataactctttcttcagtataccaataaaatattaatagcatgcaaaaaaaaaaaaaaaaaaaaaaa

SEQ ID NO: 201 - protein, 134 aa, Homo sapiens
MLLVLLSVVLLALSSAQSTDNDVNYEDFTFTIPDVEDSSQRPDQGPQRPPPEGLLPRPPGDSGNQDDGPQQRPPKPGGHHRHPPPPPFQNQQRPPRRGHRQLSLPRFPSVSLQEASSFFQRDRPARHPQEQPLW

SEQ ID NO: 202 - DNA, 3850 bp, Homo sapiens
gaccagagagaagcgtggggaagagtgggctgagggactccactagaggctgtccatctggattccctgcctccctaggagcccaacagagcaaagcaagtgggcacaaggagtatggttctaacgtgattggggtcatgaagacgttgctgttggacttggctttgtggtcactgctcttccagcccgggtggctgtcctttagttcccaggtgagtcagaactgccacaatggcagctatgaaatcagcgtcctgatgatgggcaactcagcctttgcagagcccctgaaaaacttggaagatgcggtgaatgaggggctggaaatagtgagaggacgtctgcaaaatgctggcctaaatgtgactgtgaacgctactttcatgtattcggatggtctgattcataactcaggcgactgccggagtagcacctgtgaaggcctcgacctactcaggaaaatttcaaatgcacaacggatgggctgtgtcctcatagggccctcatgtacatactccaccttccagatgtaccttgacacagaattgagctaccccatgatctcagctggaagttttggattgtcatgtgactataaagaaaccttaaccaggctgatgtctccagctagaaagttgatgtacttcttggttaacttttggaaaaccaacgatctgcccttcaaaacttattcctggagcacttcgtatgtttacaagaatggtacagaaactgaggactgtttctggtaccttaatgctctggaggctagcgtttcctatttctcccacgaactcggctttaaggtggtgttaagacaagataaggagtttcaggatatcttaatggaccacaacaggaaaagcaatgtgattattatgtgtggtggtccagagttcctctacaagctgaagggtgaccgagcagtggctgaagacattgtcattattctagtggatcttttcaatgaccagtactttgaggacaatgtcacagcccctgactatatgaaaaatgtccttgttctgacgctgtctcctgggaattcccttctaaatagctctttctccaggaatctatcaccaacaaaacgagactttgctcttgcctatttgaatggaatcctgctctttggacatatgctgaagatatttcttgaaaatggagaaaatattaccacccccaaatttgctcatgctttcaggaatctcacttttgaagggtatgacggtccagtgaccttggatgactggggggatgttgacagtaccatggtgcttctgtatacctctgtggacaccaagaaatacaaggttcttttgacctatgatacccacgtaaataagacctatcctgtggatatgagccccacattcacttggaagaactctaaacttcctaatgatattacaggccggggccctcagatcctgatgattgcagtcttcaccctcactggagctgtggtgctgctcctgctcgtcgctctcctgatgctcagaaaatatagaaaagattatgaacttcgtcagaaaaaatggtcccacattcctcctgaaaatatctttcctctggagaccaatgagaccaatcatgttagcctcaagatcgatgatgacaaaagacgagatacaatccagagactacgacagtgcaaatacgacaaaaagcgagtgattctcaaagatctcaagcacaatgatggtaatttcactgaaaaacagaagatagaattgaacaagttgcttcagattgactattacaacctgaccaagttctacggcacagtgaaacttgataccatgatcttcggggtgatagaatactgtgagagaggatccctccgggaagttttaaatgacacaatttcctaccctgatggcacattcatggattgggagtttaagatctctgtcttgtatgacattgctaagggaatgtcatatctgcactccagtaagacagaagtccatggtcgtctgaaatctaccaactgcgtagtggacagtagaatggtggtgaagatcactgattttggctgcaattccattttacctccaaaaaaggacctgtggacagctccagagcacctccgccaagccaacatctctcagaaaggagatgtgtacagctatgggatcatcgcacaggagatcatcctgcggaaagaaaccttctacactttgagctgtcgggaccggaatgagaagattttcagagtggaaaattccaatggaatgaaacccttccgcccagatttattcttggaaacagcagaggaaaaagagctagaagtgtacctacttgtaaaaaactgttgggaggaagatccagaaaagagaccagatttcaaaaaaattgagactacacttgccaagatatttggactttttcatgaccaaaaaaatgaaagctatatggataccttgatccgacgtctacagctatattctcgaaacctggaacatctggtagaggaaaggacacagctgtacaaggcagagagggacagggctgacagacttaactttatgttgcttccaaggctagtggtaaagtctctgaaggagaaaggctttgtggagccggaactatatgaggaagttacaatctacttcagtgacattgtaggtttcactactatctgcaaatacagcacccccatggaagtggtggacatgcttaatgacatctataagagttttgaccacattgttgatcatcatgatgtctacaaggtggaaaccatcggtgatgcgtacatggtggctagtggtttgcctaagagaaatggcaatcggcatgcaatagacattgccaagatggccttggaaatcctcagcttcatggggacctttgagctggagcatcttcctggcctcccaatatggattcgcattggagttcactctggtccctgtgctgctggagttgtgggaatcaagatgcctcgttattgtctatttggagatacggtcaacacagcctctaggatggaatccactggcctccctttgagaattcacgtgagtggctccaccatagccatcctgaagagaactgagtgccagttcctttatgaagtgagaggagaaacatacttaaagggaagaggaaatgagactacctactggctgactgggatgaaggaccagaaattcaacctgccaacccctcctactgtggagaatcaacagcgtttgcaagcagaattttcagacatgattgccaactctttacagaaaagacaggcagcagggataagaagccaaaaacccagacgggtagccagctataaaaaaggcactctggaatacttgcagctgaataccacagacaaggagagcacctatttttaaacctaaatgaggtataaggactcacacaaattaaaatacagctgcactgaggcagcgacctcaagtgtcctgaaagcttacattttcctgagacctcaatgaagcagaaatgtacttaggcttggctgccctgtctggaacatggactttcttgcatgaatcagatgtgtgttctcagtgaaataactaccttccactctggaaccttattccagcagttgttccagggagcttctacctggaaaagaaaagaaatgaatagactatctagaacttgagaagattttattcttatttcatttattttttgtttgtttatttttatcgtttttgtttactggctttccttctgtattcataagattttttaaattgtcataattatattttaaatacccatcttcattaaagtatatttaactcataatttttgcagaaaatatgctatatattaggcaagaataaaagctaaaggtttcccaaaaaaaaaa

SEQ ID NO: 203 - protein, 1073 aa, Homo sapiens
MKTLLLDLALWSLLFQPGWLSFSSQVSQNCHNGSYEISVLMMGNSAFAEPLKNLEDAVNEGLEIVRGRLQNAGLNVTVNATFMYSDGLIHNSGDCRSSTCEGLDLLRKISNAQRMGCVLIGPSCTYSTFQMYLDTELSYPMISAGSFGLSCDYKETLTRLMSPARKLMYFLVNFWKTNDLPFKTYSWSTSYVYKNGTETEDCFWYLNALEASVSYFSHELGFKVVLRQDKEFQDILMDHNRKSNVIIMCGGPEFLYKLKGDRAVAEDIVIILVDLFNDQYFEDNVTAPDYMKNVLVLTLSPGNSLLNSSFSRNLSPTKRDFALAYLNGILLFGHMLKIFLENGENITTPKFAHAFRNLTFEGYDGPVTLDDWGDVDSTMVLLYTSVDTKKYKVLLTYDTHVNKTYPVDMSPTFTWKNSKLPNDITGRGPQILMIAVFTLTGAVVLLLLVALLMLRKYRKDYELRQKKWSHIPPENIFPLETNETNHVSLKIDDDKRRDTIQRLRQCKYDKKRVILKDLKHNDGNFTEKQKIELNKLLQIDYYNLTKFYGTVKLDTMIFGVIEYCERGSLREVLNDTISYPDGTFMDWEFKISVLYDIAKGMSYLHSSKTEVHGRLKSTNCVVDSRMVVKITDFGCNSILPPKKDLWTAPEHLRQANISQKGDVYSYGIIAQEIILRKETFYTLSCRDRNEKIFRVENSNGMKPFRPDLFLETAEEKELEVYLLVKNCWEEDPEKRPDFKKIETTLAKIFGLFHDQKNESYMDTLIRRLQLYSRNLEHLVEERTQLYKAERDRADRLNFMLLPRLVVKSLKEKGFVEPELYEEVTIYFSDIVGFTTICKYSTPMEVVDMLNDIYKSFDHIVDHHDVYKVETIGDAYMVASGLPKRNGNRHAIDIAKMALEILSFMGTFELEHLPGLPIWIRIGVHSGPCAAGVVGIKMPRYCLFGDTVNTASRMESTGLPLRIHVSGSTIAILKRTECQFLYEVRGETYLKGRGNETTYWLTGMKDQKFNLPTPPTVENQQRLQAEFSDMIANSLQKRQAAGIRSQKPRRVASYKKGTLEYLQLNTTDKESTYF

SEQ ID NO: 204 - DNA, 2744 bp, Homo sapiens
ctcgtgccgaattcggcacgagaccgcgtgttcgcgcctggtagagatttctcgaagacaccagtgggcccgtgtggaaccaaacctgcgcgcgtggccgggccgtgggacaacgaggccgcggagacgaaggcgcaatggcgaggaagttatctgtaatcttgatcctgacctttgccctctctgtcacaaatccccttcatgaactaaaagcagctgctttcccccagaccactgagaaaattagtccgaattgggaatctggcattaatgttgacttggcaatttccacacggcaatatcatctacaacagcttttctaccgctatggagaaaataattctttgtcagttgaagggttcagaaaattacttcaaaatataggcatagataagattaaaagaatccatatacaccatgaccacgaccatcactcagaccacgagcatcactcagaccatgagcgtcactcagaccatgagcatcactcagaccacgagcatcactctgaccataatcatgctgcttctggtaaaaataagcgaaaagctctttgcccagaccatgactcagatagttcaggtaaagatcctagaaacagccaggggaaaggagctcaccgaccagaacatgccagtggtagaaggaatgtcaaggacagtgttagtgctagtgaagtgacctcaactgtgtacaacactgtctctgaaggaactcactttctagagacaatagagactccaagacctggaaaactcttccccaaagatgtaagcagctccactccacccagtgtcacatcaaagagccgggtgagccggctggctggtaggaaaacaaatgaatctgtgagtgagccccgaaaaggctttatgtattccagaaacacaaatgaaaatcctcaggagtgtttcaatgcatcaaagctactgacatctcatggcatgggcatccaggttccgctgaatgcaacagagttcaactatctctgtccagccatcatcaaccaaattgatgctagatcttgtctgattcatacaagtgaaaagaaggctgaaatccctccaaagacctattcattacaaatagcctgggttggtggttttatagccatttccatcatcagtttcctgtctctgctgggggttatcttagtgcctctcatgaatcgggtgtttttcaaatttctcctgagtttccttgtggcactggccgttgggactttgagtggtgatgcttttttacaccttcttccacattctcatgcaagtcaccaccatagtcatagccatgaagaaccagcaatggaaatgaaaagaggaccacttttcagtcatctgtcttctcaaaacatagaagaaagtgcctattttgattccacgtggaagggtctaacagctctaggaggcctgtatttcatgtttcttgttgaacatgtcctcacattgatcaaacaatttaaagataagaagaaaaagaatcagaagaaacctgaaaatgatgatgatgtggagattaagaagcagttgtccaagtatgaatctcaactttcaacaaatgaggagaaagtagatacagatgatcgaactgaaggctatttacgagcagactcacaagagccctcccactttgattctcagcagcctgcagtcttggaagaagaagaggtcatgatagctcatgctcatccacaggaagtctacaatgaatatgtacccagagggtgcaagaataaatgccattcacatttccacgatacactcggccagtcagacgatctcattcaccaccatcatgactaccatcatattctccatcatcaccaccaccaaaaccaccatcctcacagtcacagccagcgctactctcgggaggagctgaaagatgccggcgtcgccactttggcctggatggtgataatgggtgatggcctgcacaatttcagcgatggcctagcaattggtgctgcttttactgaaggcttatcaagtggtttaagtacttctgttgctgtgttctgtcatgagttgcctcatgaattaggtgactttgctgttctactaaaggctggcatgaccgttaagcaggctgtcctttataatgcattgtcagccatgctggcgtatcttggaatggcaacaggaattttcattggtcattatgctgaaaatgtttctatgtggatatttgcacttactgctggcttattcatgtatgttgctctggttgatatggtacctgaaatgctgcacaatgatgctagtgaccatggatgtagccgctgggggtatttctttttacagaatgctgggatgcttttgggttttggaattatgttacttatttccatatttgaacataaaatcgtgtttcgtataaatttctagttaaggtttaaatgctagagtagcttaaaaagttgtcatagtttcagtaggtcatagggagatgagtttgtatgctgtactatgcagcgtttaaagttagtgggttttgtgatttttgtattgaatattgctgtctgttacaaagtcagttaaaggtacgttttaatatttaagttattctatcttggagataaaatctgtatgtgcaattcaccggtattaccagtttattatgtaaacaagagatttggcatgacatgttctgtatgtttcagggaaaaatgtctttaatgctttttcaagaactaacacagttattcctatactggattttaggtctctgaagaactgctggtg

SEQ ID NO: 205 - protein, 749 aa, Homo sapiens
MARKLSVILILTFALSVTNPLHELKAAAFPQTTEKISPNWESGINVDLAISTRQYHLQQLFYRYGENNSLSVEGFRKLLQNIGIDKIKRIHIHHDHDHHSDHEHHSDHERHSDHEHHSDHEHHSDHNHAASGKNKRKALCPDHDSDSSGKDPRNSQGKGAHRPEHASGRRNVKDSVSASEVTSTVYNTVSEGTHFLETIETPRPGKLFPKDVSSSTPPSVTSKSRVSRLAGRKTNESVSEPRKGFMYSRNTNENPQECFNASKLLTSHGMGIQVPLNATEFNYLCPAIINQIDARSCLIHTSEKKAEIPPKTYSLQIAWVGGFIAISIISFLSLLGVILVPLMNRVFFKFLLSFLVALAVGTLSGDAFLHLLPHSHASHHHSHSHEEPAMEMKRGPLFSHLSSQNIEESAYFDSTWKGLTALGGLYFMFLVEHVLTLIKQFKDKKKKNQKKPENDDDVEIKKQLSKYESQLSTNEEKVDTDDRTEGYLRADSQEPSHFDSQQPAVLEEEEVMIAHAHPQEVYNEYVPRGCKNKCHSHFHDTLGQSDDLIHHHHDYHHILHHHHHQNHHPHSHSQRYSREELKDAGVATLAWMVIMGDGLHNFSDGLAIGAAFTEGLSSGLSTSVAVFCHELPHELGDFAVLLKAGMTVKQAVLYNALSAMLAYLGMATGIFIGHYAENVSMWIFALTAGLFMYVALVDMVPEMLHNDASDHGCSRWGYFFLQNAGMLLGFGIMLLISIFEHKIVFRINF

SEQ ID NO: 206 - DNA, 5551 bp, Homo sapiens
  misc_feature (1769)..(1769): n is a, c, g, or t
ttttcatggaaatatcttcaaatttcattagtggtcctattatagaagacacacagcaggcaagtgtcagagctagaaatgaccctaaatttctgggtccctattcagcagccataagcaattgccagctgcaggaaggtggaggcagaagaagtaaaaagggaacaagaggtgaggtttacgttctgcctaagtggaacagagtagaactttgcacaaactccttaatcttgcctagaggcagaatgtgggatgtactatatgggaggcaggcaaatctgggcctggttcccacctccatcactcatttgaacaagttatgtaatttatttttgcgtcaattttcttgtctgtaaaactggagtgagaggacctaacttgagtaccgaagtgaagagtcaatgagataatatctgtgatcagcacagtgcttggcaagtggaagacactcagtcaagctaacttaaagccccagttttttcatttgtacaacagaacaacaacaataatagcaacaagcaataatactaacaatatttatcttgcctctgagttgtcttgaaaatcagatgagtatatatattatgtttctaaattctaaagtgtatctcactctcctaacaaagcagttggtcttcagatcaggaccagagttaataccatgccagagcattattacaggttttttccaatgagtaattaattttatttttaaacttatcatacagtaaaattgactcttttggtttacaaagttctatgagttatagcacgttgtataggtttatgtaaccaccaccacaatccggatacagaacatgactacagctttagagattctttttcaaagtgttttacattcatgttgcaaaacacttttaaaaataagaaaagagatgtagataaacgtgctgaagatgcaaattaatgaaaccagcttttgtgcacaaatctctgcagtttccagtgttttcagcttttgtctgagccatttttgctgtcggctttgcagactatctctttctataaaagtaatcaggcgtccgttggagagttgggtctttcttcacattaaaggcacatgtcccaggcacaagcctcaggatccttatttgatcttttttaatacgaccaggtcttaaatttccgaaccatgttttccctaattgccattttctctctaaaatgaagaagcctggaagaaccttcttatcccttcggggaaattatttaattgggacaaaggggatgtggagttacagagagcaacgatagggctttcaggaacccaaaacctgtctggtataataacagatccttccggtaaccaaccattcaatttgtccctctcccccaaccccatcctctccatcaccatctgccagatggccccctgggaccaatcgactttgaaaccaaacttctctcccaggtcagctcctgcaatccccactcctcgtcccttggagctttctccacagaagtgacttgacacaccgcgctacatctggggaggggggcgggtccgctttccgggagactcaagtctttgctatttgccttttgtttctgggatgcctttggctgcctttctcttccatctgcttttaattttggtaagagaaaagctaatgaatcaggaatgaatctcctctccactaatctttwtgttttctttctctctctctctctcttagagttggcgcgctctcttcacgagttccatcactacccaagaagtgagggggcgggggggacaggcgggaagncattaattacacctaaatctgaagtttgcggcctcaagtaccactttgatggggagagcttctgaagcttccatacaacctgccgtgcctttgctgctgccgcagtagattttcagctcatttctttctgctgctgcttcgcgctgctctgtcatgcctaaatctatctcgtcactgccaaaggtgcctgaatcagggtgaattccacgagattcaccagcggttttgctccagtccaaggtaaatacagtatgcaaaatgaggaaccacccaaggatgtcggggaggggggagagaaagggattccctcaccttttccggcacattcctcgttaatttccaccaggaggaggcgcgcagcccagctcccctagtctctcttcttaaatccccctacctacggctgccgaggttggccgcgcgtcgggagtctccccgacagtcctggccctcccccgccccccgggttggtttttcccagctgcggaggttgggaggttgggccaggggctggggtgcgaagagagtcggcgcccgcaacgcggagccgggaagtcgtcgctactctggtggaactcagagttggttctggaggcggcggacgcggaggtgagcagtgggagcccgcggcctgggagagacccgggaggcgtcgttggggcccctccccatcctcgggtggagagtagggttggttcgggttgccactgtaccccgagtcccactgctgctttgttcccagactctcccctcctctttggagatgacttgaacccctttgagatccgaggggctggcggggcgcgggctggggggcgacagttgtagctccacttcctgctaatgcgagaaggtacaaaaagagatcaaaaagtcctgtaacctgaaacttccctcgcatcctaaccgggaccgggtggagaggtctgggcgggggcggagacacccggaggccgaccttccgccgaggcggtgcaggaaggaacgggagagggagaagtttggtagggaaggaattggggattaagcggtaagttagacgcgggagacgatctcctcgggaaaggcggagggcgggaggccggtcgggtttatttagtgtgggccagggaagaaggaagactttgcggtctgggtgtcggatgcgcgtccccctccggagtaaaagtgaccggaggggttggggaggcgaggccggggcgggcttttggaaggaggtctctgggacagactggagacgactagactcgaaaaggccggtttttgcactccggaagccgcggcagccaccgctgttcacgcctctctcctgcttgtcccaggtccctcagaggatccagcgaggggtgccaacaagaggcgaagaggtggcaccagggcggcggcaggaagaggagcgggagcaggagcgcggagcggagcgtcccgacccgccgtgcgtactttctggagggaaggggcgggggaatcggcccctgagggaagcgcccggtggcgagggggttagccaagttccggctgcggcgccactccctcggttccacgagaggaaagttttttttttccagacgcttccgccggctcgcgccctccgggcccagcctcccgagccttcggagcgggcgccgtcccagcccagctccggggaaacgcgagccgcgatgcctggggggtgctcccggggccccgccgccggggacgggcgtctgcggctggcgcgactagcgctggtactcctgggctgggtctcctcgtcttctcccacctcctcggcatcctccttctcctcctcggcgccgttcctggcttccgccgtgtccgcccagcccccgctgccggaccagtgccccgcgctgtgcgagtgctccgaggcagcgcgcacagtcaagtgcgttaaccgcaatctgaccgaggtgcccacggacctgcccgcctacgtgcgcaacctcttccttaccggcaaccagctggccgtgctccctgccggcgccttcgcccgccggccgccgctggcggagctggccgcgctcaacctcagcggcagccgcctggacgaggtgcgcgcgggcgccttcgagcatctgcccagcctgcgccagctcgacctcagccacaacccactggccgacctcagtcccttcgctttctcgggcagcaatgccagcgtctcggcccccagtccccttgtggaactgatcctgaaccacatcgtgccccctgaagatgagcggcagaaccggagcttcgagggcatggtggtggcggccctgctggcgggccgtgcactgcaggggctccgccgcttggagctggccagcaaccacttcctttacctgccgcgggatgtgctggcccaactgcccagcctcaggcacctggacttaagtaataattcgctggtgagcctgacctacgtgtccttccgcaacctgacacatctagaaagcctccacctggaggacaatgccctcaaggtccttcacaatggcaccctggctgagttgcaaggtctaccccacattagggttttcctggacaacaatccctgggtctgcgactgccacatggcagacatggtgacctggctcaaggaaacagaggtagtgcagggcaaagaccggctcacctgtgcatatccggaaaaaatgaggaatcgggtcctcttggaactcaacagtgctgacctggactgtgacccgattcttcccccatccctgcaaacctcttatgtcttcctgggtattgttttagccctgataggcgctattttcctcctggttttgtatttgaaccgcaaggggataaaaaagtggatgcataacatcagagatgcctgcagggatcacatggaagggtatcattacagatatgaaatcaatgcggaccccagattaacaaacctcagttctaactcggatgtctgagaaatattagaggacagaccaaggacaactctgcatgagatgtagacttaagctttatccctactaggcttgctccactttcatcctccactatagatacaacggactttgactaaaagcagtgaaggggatttgcttccttgttatgtaaagtttctcggtgtgttctgttaatgtaagacgatgaacagttgtgtatagtgttttaccctcttctttttcttggaactcctcaacacgtatggagggatttttcaggtttcagcatgaacatgggcttcttgctgtctgtctctctctcagtacagttcaaggtgtagcaagtgtacccacacagatagcattcaacaaaagctgcctcaactttttcgagaaaaatactttattcataaatatcagttttattctcatgtacctaagttgtggagaaaataattgcatcctataaactgcctgcagacgttagcaggctcttcaaaataactccatggtgcacaggagcacctgcatccaagagcatgcttacattttactgttctgcatattacaaaaaataacttgcaacttcataacttctttgacaaagtaaattacttttttgattgcagtttatatgaaaatgtactgatttttttttaataaactgcatcgagatccaaccgactgaattgttaaaaaaaaaaaaaaataaacattgttaaaacaattacagtgtgtgcaagtttgctttgaaaaaaggatgaagggcaggagtattcaatggtcttggttccgatgataattattacttaacatagctgagaatcaaactgtagcaatgtctaatataaatagacttgggagatcgtttcgaaatgg

SEQ ID NO: 207 - protein, 420 aa, Homo sapiens
MPGGCSRGPAAGDGRLRLARLALVLLGWVSSSSPTSSASSFSSSAPFLASAVSAQPPLPDQCPALCECSEAARTVKCVNRNLTEVPTDLPAYVRNLFLTGNQLAVLPAGAFARRPPLAELAALNLSGSRLDEVRAGAFEHLPSLRQLDLSHNPLADLSPFAFSGSNASVSAPSPLVELILNHIVPPEDERQNRSFEGMVVAALLAGRALQGLRRLELASNHFLYLPRDVLAQLPSLRHLDLSNNSLVSLTYVSFRNLTHLESLHLEDNALKVLHNGTLAELQGLPHIRVFLDNNPWVCDCHMADMVTWLKETEVVQGKDRLTCAYPEKMRNRVLLELNSADLDCDPILPPSLQTSYVFLGIVLALIGAIFLLVLYLNRKGIKKWMHNIRDACRDHMEGYHYRYEINADPRLTNLSSNSDV

SEQ ID NO: 208 - DNA, 5977 bp, Homo sapiens
tgtctctcttacctccttgatgttcggcactatttgtggccggcgtggtggaaggacacagtgaggttctcacccccgccccccgctcctcgctcccatcccagttccatcaaaacgaacccgggccagcgcaaggatctccgagttgcgagtgtgctgaggctgggactgtcactcattctccgatcagcgcgtgaacgcagctcggctgccgctggcaggaaacaattctgcaaaaataatcatactcagcctggcaattgtctgcccctaggtctgtcgctcagccgccgtccacactcgctgcaggggggggggcacagaatttaccgcggcaagaacatccctcccagccagcagattacaatgctgcaaactaaggatctcatctggactttgtttttcctgggaactgcagtttctctgcaggtggatattgttcccagccagggggagatcagcgttggagagtccaaattcttcttatgccaagtggcaggagatgccaaagataaagacatctcctggttctcccccaatggagaaaagctcaccccaaaccagcagcggatctcagtggtgtggaatgatgattcctcctccaccctcaccatctataacgccaacatcgacgacgccggcatttacaagtgtgtggttacaggcgaggatggcagtgagtcagaggccaccgtcaacgtgaagatctttcagaagctcatgttcaagaatgcgccaaccccacaggagttccgggagggggaagatgccgtgattgtgtgtgatgtggtcagctccctcccaccaaccatcatctggaaacacaaaggccgagatgtcatcctgaaaaaagatgtccgattcatagtcctgtccaacaactacctgcagatccggggcatcaagaaaacagatgagggcacttatcgctgtgagggcagaatcctggcacggggggagatcaacttcaaggacattcaggtcattgtgaatgtgccacctaccatccaggccaggcagaatattgtgaatgccaccgccaacctcggccagtccgtcaccctggtgtgcgatgccgaaggcttcccagagcccaccatgagctggacaaaggatggggaacagatagagcaagaggaagacgatgagaagtacatcttcagcgacgatagttcccagctgaccatcaaaaaggtggataagaacgacgaggctgagtacatctgcattgctgagaacaaggctggcgagcaggatgcgaccatccacctcaaagtctttgcaaaacccaaaatcacatatgtagagaaccagactgccatggaattagaggagcaggtcactcttacctgtgaagcctccggagaccccattccctccatcacctggaggacttctacccggaacatcagcagcgaagaaaagactctggatgggcacatggtggtgcgtagccatgcccgtgtgtcgtcgctgaccctgaagagcatccagtacactgatgccggagagtacatctgcaccgccagcaacaccatcggccaggactcccagtccatgtaccttgaagtgcaatatgccccaaagctacagggccctgtggctgtgtacacttgggaggggaaccaggtgaacatcacctgcgaggtatttgcctatcccagtgccacgatctcatggtttcgggatggccagctgctgccaagctccaattacagcaatatcaagatctacaacaccccctctgccagctatctggaggtgaccccagactctgagaatgattttgggaactacaactgtactgcagtgaaccgcattgggcaggagtccttggaattcatccttgttcaagcagacaccccctcttcaccatccatcgaccaggtggagccatactccagcacagcccaggtgcagtttgatgaaccagaggccacaggtggggtgcccatcctcaaatacaaagctgagtggagagcagttggtgaagaagtatggcattccaagtggtatgatgccaaggaagccagcatggagggcatcgtcaccatcgtgggcctgaagcccgaaacaacgtacgccgtaaggctggcggcgctcaatggcaaagggctgggtgagatcagcgcggcctccgagttcaagacgcagccagtccaaggggaacccagtgcacctaagctcgaagggcagatgggagaggatggaaactctattaaagtgaacctgatcaagcaggatgacggcggctcccccatcagacactatctggtcaggtaccgagcgctctcctccgagtggaaaccagagatcaggctcccgtctggcagtgaccacgtcatgctgaagtccctggactggaatgctgagtatgaggtctacgtggtggctgagaaccagcaaggaaaatccaaggcggctcattttgtgttcaggacctcggcccagcccacagccatcccagccaacggcagccccacctcaggcctgagcaccggggccatcgtgggcatcctcatcgtcatcttcgtcctgctcctggtggttgtggacatcacctgctacttcctgaacaagtgtggcctgttcatgtgcattgcggtcaacctgtgtggaaaagccgggcccggggccaagggcaaggacatggaggagggcaaggccgccttctcgaaagatgagtccaaggagcccatcgtggaggttcgaacggaggaggagaggaccccaaaccatgatggagggaaacacacagagcccaacgagaccacgccactgacggagcccgagaagggccccgtagaagcaaagccagagtgccaggagacagaaacgaagccagcgccagccgaagtcaagacggtccccaatgacgccacacagacaaaggagaacgagagcaaagcatgatgggtgaagagaaccgagcaaagatcaaaataaaaagtgacacagcagcttcaccagagcatttccaacaccacagacacacacacgcacgcacacacacaaacacacatgcacacacacacatctcatttctctagtgtcttttgcctttaaaaaaaactaaacagataaaacatgggaatctcctttttgtaggtttatagaaagggtccctttgttgcacactcacttgtaagaaaatgagacaaaaaggttaaacccacagccaaactaggacactccgttccctgaaaccgttaaaaaatcaaacaaaaggaccccaaattaagaatctaggaagctcagaaacgaaatctaggttcaggaagaccacacttggtgttacccgattggcacagaccagtttcagagaaatactttcaggcactaagactaatcgaatgaacaaagtccacagtttatttttatactttcagtcaagtttgaactctgtaaaacctcataaataagttataatttctgttcactttgtatttgttcagtatgcaaagtgtgtcaccctttctagctgaattcaattcccacgtagactcttattttataggacgaatgccaaattgcagcttctgggggtagatctcaatttgcagtattcagacttctttttctttcttttacattcttttttctttctttctttctgccaactttgttttccagtgtttacaaggtgacaaatgtttgactttggttgtgtttaaatgtccgtgtaaaatagctgccttttattttttaaggtaacaaataccacctagaggtaggtaggatcatcccacgcttgctttagcacaggacaactttacaaaacatgattgtttacagctgctcttcccctcttttctgatctgcagtttttgcctgggtcccactcaggtgaaaatccatctcattctggaatggttttgcttttgaatttttggttatttttgtgtttctttgggggttagaccactttctgattagccgccacctgcctgcatctgtgaaaagggatctgctcccaggcgttctcacccttcttttgaaggactccttaggctttgttgaatgaagcagagaagattgtatagttggggctggtcttggtgaacacacattattaccccacacatcccctttgtgtagaaagccaaataaaatctatacataccatttccttttgagcccagaatctagatttgagcggaagagcatgtgtgcttcagggaattagtgtctttttttggaaatctgttgaagtaaagtaacatcggccttctgttcacttaggcagcatttatagaaacaaaagaagaaagaaacaacctactgtctggagtcataacacaactttcctggattggaaaccaagtgggggaaaaaatacagaaactttaagggggatgggaggggggggagaagggaaaagccagccctttgtatagaaattttgcttttttttccctcattctactttagaactgcaagcttgtgcactgtggatgcgtgaatattttagtgtgaaacgtgtttttgtcatagtattgaaataaaacttcaacatagtttggttgtggaaggtatagcagatagttcagaaaaaatattcaggaaacaaaaatcactcaaacggaatcgaagccttttaacaaagaaaatgaaatacagatgatgatgatgatgatgaagatgatgctaagtaaacagaaatcagtactccgcatgcgctcctctcctaaggtacaaagcagcaagaggttagggtggcaaggctgcctctgggtccattctgtgggccactctccccaacgttctgacacttctgcagtctgatcagtggcgatgctagattataatttcaaactgtgaagaataatggtcttgtcatttgctcaatgtggggttatgttgcattttctcagctcctggggatggaaatggaggatcccagaacacacagccctggcccctttgattctagggcctgcacagatctctggttcaaatgcacaggccctcagaatagaggaacatgaagagagatcttagagcacacagtagaatgtgagagcctgggtgtctgagaccgggagggcccagcagtgaggggcaggctcttctggtcaccaggctgttcagtggactcagttcttcatcttgtaatgtcgatggctttgccacaccaggccaagcccatgccataccttgtcaagactgtcaaagtggttgtggttaggtcaaactggttttggttctgatggttaggaagaaacaggtcagccctcagatcacctggcccgggacagctgaccccctagaaccctggctctgccattagctaggacctaagactctgcccacattttggtctgttctctcccattacacataggtttgtctcagcatgcaagagtttttcctttaaaaaaaaaaaaaaaaaaaaaaaaaaagcaatgctttctctaaaatcaaagagggagtcattttattccaagatgttttatcttttatgttaagagatcaaagcttataattttcttttttaatttttgaaggagggatcaactccagtttccaatgtctatgtgtctatgtgtgtatgtgccatacatatgtattcacatgaagaccggcatggccaagttctgctggaggagcactcaagtgtgacgagcagggccactggaccctgcagggctgtggtgtatatagtgcagctttggaggtggaactctattttcacacttttctatggagccttccgagtcccaggttttcacttgaggctgtctgtctggatggcggttttcagacctccattaacatccctacccagcattctgtacttcgggggccttctctcttgttataaaactttttaccaagtgaaacatcgataccacctttgtttccattctcactggtgtaaatactgagtactaactgagaattttgactttgcattctgtcggaatacttgtgttcaataaaaattgaaagaaaaaagctaaaaaaaaaaaaaaaa

SEQ ID NO: 209 - protein, 848 aa, Homo sapiens
MLQTKDLIWTLFFLGTAVSLQVDIVPSQGEISVGESKFFLCQVAGDAKDKDISWFSPNGEKLTPNQQRISVVWNDDSSSTLTIYNANIDDAGIYKCVVTGEDGSESEATVNVKIFQKLMFKNAPTPQEFREGEDAVIVCDVVSSLPPTIIWKHKGRDVILKKDVRFIVLSNNYLQIRGIKKTDEGTYRCEGRILARGEINFKDIQVIVNVPPTIQARQNIVNATANLGQSVTLVCDAEGFPEPTMSWTKDGEQIEQEEDDEKYIFSDDSSQLTIKKVDKNDEAEYICIAENKAGEQDATIHLKVFAKPKITYVENQTAMELEEQVTLTCEASGDPIPSITWRTSTRNISSEEKTLDGHMVVRSHARVSSLTLKSIQYTDAGEYICTASNTIGQDSQSMYLEVQYAPKLQGPVAVYTWEGNQVNITCEVFAYPSATISWFRDGQLLPSSNYSNIKIYNTPSASYLEVTPDSENDFGNYNCTAVNRIGQESLEFILVQADTPSSPSIDQVEPYSSTAQVQFDEPEATGGVPILKYKAEWRAVGEEVWHSKWYDAKEASMEGIVTIVGLKPETTYAVRLAALNGKGLGEISAASEFKTQPVQGEPSAPKLEGQMGEDGNSIKVNLIKQDDGGSPIRHYLVRYRALSSEWKPEIRLPSGSDHVMLKSLDWNAEYEVYVVAENQQGKSKAAHFVFRTSAQPTAIPANGSPTSGLSTGAIVGILIVIFVLLLVVVDITCYFLNKCGLFMCIAVNLCGKAGPGAKGKDMEEGKAAFSKDESKEPIVEVRTEEERTPNHDGGKHTEPNETTPLTEPEKGPVEAKPECQETETKPAPAEVKTVPNDATQTKENESKA

SEQ ID NO: 210 - DNA, 1108 bp, Homo sapiens
ctggaggcctggctggtgctcacatacaataattaactgctgagtggccttcgcccaatcccaggctccactcctgggctccattcccactccctgcctgtctcctaggccactaaaccacagctgtcccctggaataaggcaagggggagtgtagagcagagcagaagcctgagccagacggagagccacctcctctcccagggacagacatggctcagcggatgacaacacagctgctgctccttctagtgtgggtggctgtagtaggggaggctcagacaaggattgcatgggccaggactgagcttctcaatgtctgcatgaacgccaagcaccacaaggaaaagccaggccccgaggacaagttgcatgagcagtgtcgaccctggaggaagaatgcctgctgttctaccaacaccagccaggaagcccataaggatgtttcctacctatatagattcaactggaaccactgtggagagatggcacctgcctgcaaacggcatttcatccaggacacctgcctctacgagtgctcccccaacttggggccctggatccagcaggtggatcagagctggcgcaaagagcgggtactgaacgtgcccctgtgcaaagaggactgtgagcaatggtgggaagattgtcgcacctcctacacctgcaagagcaactggcacaagggctggaactggacttcagggtttaacaagtgcgcagtgggagctgcctgccaacctttccatttctacttccccacacccactgttctgtgcaatgaaatctggactcactcctacaaggtcagcaactacagccgagggagtggccgctgcatccagatgtggttcgacccagcccagggcaaccccaatgaggaggtggcgaggttctatgctgcagccatgagtggggctgggccctgggcagcctggcctttcctgcttagcctggccctaatgctgctgtggctgctcagctgacctccttttaccttctgatacctggaaatccctgccctgttcagccccacagctcccaactatttggttcctgctccatggtcgggcctctgacagccactttgaataaaccagacaccgcac

SEQ ID NO: 211 - protein, 257 aa, Homo sapiens
MAQRMTTQLLLLLVWVAVVGEAQTRIAWARTELLNVCMNAKHHKEKPGPEDKLHEQCRPWRKNACCSTNTSQEAHKDVSYLYRFNWNHCGEMAPACKRHFIQDTCLYECSPNLGPWIQQVDQSWRKERVLNVPLCKEDCEQWWEDCRTSYTCKSNWHKGWNWTSGFNKCAVGAACQPFHFYFPTPTVLCNEIWTHSYKVSNYSRGSGRCIQMWFDPAQGNPNEEVARFYAAAMSGAGPWAAWPFLLSLALMLLWLLS

SEQ ID NO: 212 - DNA, 2669 bp, Homo sapiens
cagatgccagaagaacactgttgctcttggtggacgggcccagaggaattcagagttaaaccttgagtgcctgcgtccgtgagaattcagcatggaatgtctctactatttcctgggatttctgctcctggctgcaagattgccacttgatgccgccaaacgatttcatgatgtgctgggcaatgaaagaccttctgcttacatgagggagcacaatcaattaaatggctggtcttctgatgaaaatgactggaatgaaaaactctacccagtgtggaagcggggagacatgaggtggaaaaactcctggaagggaggccgtgtgcaggcggtcctgaccagtgactcaccagccctcgtgggctcaaatataacatttgcggtgaacctgatattccctagatgccaaaaggaagatgccaatggcaacatagtctatgagaagaactgcagaaatgaggctggtttatctgctgatccatatgtttacaactggacagcatggtcagaggacagtgacggggaaaatggcaccggccaaagccatcataacgtcttccctgatgggaaaccttttcctcaccaccccggatggagaagatggaatttcatctacgtcttccacacacttggtcagtatttccagaaattgggacgatgttcagtgagagtttctgtgaacacagccaatgtgacacttgggcctcaactcatggaagtgactgtctacagaagacatggacgggcatatgttcccatcgcacaagtgaaagatgtgtacgtggtaacagatcagattcctgtgtttgtgactatgttccagaagaacgatcgaaattcatccgacgaaaccttcctcaaagatctccccattatgtttgatgtcctgattcatgatcctagccacttcctcaattattctaccattaactacaagtggagcttcggggataatactggcctgtttgtttccaccaatcatactgtgaatcacacgtatgtgctcaatggaaccttcagccttaacctcactgtgaaagctgcagcaccaggaccttgtccgccaccgccaccaccacccagaccttcaaaacccaccccttctttaggacctgctggtgacaaccccctggagctgagtaggattcctgatgaaaactgccagattaacagatatggccactttcaagccaccatcacaattgtagagggaatcttagaggttaacatcatccagatgacagacgtcctgatgccggtgccatggcctgaaagctccctaatagactttgtcgtgacctgccaagggagcattcccacggaggtctgtaccatcatttctgaccccacctgcgagatcacccagaacacagtctgcagccctgtggatgtggatgagatgtgtctgctgactgtgagacgaaccttcaatgggtctgggacgtactgtgtgaacctcaccctgggggatgacacaagcctggctctcacgagcaccctgatttctgttcctgacagagacccagcctcgcctttaaggatggcaaacagtgccctgatctccgttggctgcttggccatatttgtcactgtgatctccctcttggtgtacaaaaaacacaaggaatacaacccaatagaaaatagtcctgggaatgtggtcagaagcaaaggcctgagtgtctttctcaaccgtgcaaaagccgtgttcttcccgggaaaccaggaaaaggatccgctactcaaaaaccaagaatttaaaggagtttcttaaatttcgaccttgtttctgaagctcacttttcagtgccattgatgtgagatgtgctggagtggctattaacctttttttcctaaagattattgttaaatagatattgtggtttggggaagttgaattttttataggttaaatgtcattttagagatggggagagggattatactgcaggcagcttcagccatgttgtgaaactgataaaagcaacttagcaaggcttcttttcattattttttatgtttcacttataaagtcttaggtaactagtaggatagaaacactgtgtcccgagagtaaggagagaagctactattgattagagcctaacccaggttaactgcaagaagaggcgggatactttcagctttccatgtaactgtatgcataaagccaatgtagtccagtttctaagatcatgttccaagctaactgaatcccacttcaatacacactcatgaactcctgatggaacaataacaggcccaagcctgtggtatgatgtgcacacttgctagactcagaaaaaatactactctcataaatgggtgggagtattttggtgacaacctactttgcttggctgagtgaaggaatgatattcatatattcatttattccatggacatttagttagtgctttttatataccaggcatgatgctgagtgacactcttgtgtatatttccaaatttttgtatagtcgctgcacatatttgaaatcatatattaagactttccaaagatgaggtccctggtttttcatggcaacttgatcagtaaggatttcacctctgtttgtaactaaaaccatctactatatgttagacatgacattctttttctctccttcctgaaaaataaagtgtgggaagagacaaaaaaaaaaaaa

SEQ ID NO: 213 - protein, 560 aa, Homo sapiens
MECLYYFLGFLLLAARLPLDAAKRFHDVLGNERPSAYMREHNQLNGWSSDENDWNEKLYPVWKRGDMRWKNSWKGGRVQAVLTSDSPALVGSNITFAVNLIFPRCQKEDANGNIVYEKNCRNEAGLSADPYVYNWTAWSEDSDGENGTGQSHHNVFPDGKPFPHHPGWRRWNFIYVFHTLGQYFQKLGRCSVRVSVNTANVTLGPQLMEVTVYRRHGRAYVPIAQVKDVYVVTDQIPVFVTMFQKNDRNSSDETFLKDLPIMFDVLIHDPSHFLNYSTINYKWSFGDNTGLFVSTNHTVNHTYVLNGTFSLNLTVKAAAPGPCPPPPPPPRPSKPTPSLGPAGDNPLELSRIPDENCQINRYGHFQATITIVEGILEVNIIQMTDVLMPVPWPESSLIDFVVTCQGSIPTEVCTIISDPTCEITQNTVCSPVDVDEMCLLTVRRTFNGSGTYCVNLTLGDDTSLALTSTLISVPDRDPASPLRMANSALISVGCLAIFVTVISLLVYKKHKEYNPIENSPGNVVRSKGLSVFLNRAKAVFFPGNQEKDPLLKNQEFKGVS

SEQ ID NO: 214 - DNA, 1440 bp, Homo sapiens
gttacccagcattgtgagtgacagagcctggatctgaacgctgatcccataatgcatcctcaagtggtcatcttaagcctcatcctacatctggcagattctgtagctggttctgtaaaggttggtggagaggcaggtccatctgtcacactaccctgccactacagtggagctgtcacatcaatgtgctggaatagaggctcatgttctctattcacatgccaaaatggcattgtctggaccaatggaacccacgtcacctatcggaaggacacacgctataagctattgggggacctttcaagaagggatgtctctttgaccatagaaaatacagctgtgtctgacagtggcgtatattgttgccgtgttgagcaccgtgggtggttcaatgacatgaaaatcaccgtatcattggagattgtgccacccaaggtcacgactactccaattgtcacaactgttccaaccgtcacgactgttcgaacgagcaccactgttccaacgacaacgactgttccaacgacaactgttccaacaacaatgagcattccaacgacaacgactgttccgacgacaatgactgtttcaacgacaacgagcgttccaacgacaacgagcattccaacaacaacaagtgttccagtgacaacaacggtctctacctttgttcctccaatgcctttgcccaggcagaaccatgaaccagtagccacttcaccatcttcacctcagccagcagaaacccaccctacgacactgcagggagcaataaggagagaacccaccagctcaccattgtactcttacacaacagatgggaatgacaccgtgacagagtcttcagatggcctttggaataacaatcaaactcaactgttcctagaacatagtctactgacggccaataccactaaaggaatctatgctggagtctgtatttctgtcttggtgcttcttgctcttttgggtgtcatcattgccaaaaagtatttcttcaaaaaggaggttcaacaactaagtgtttcatttagcagccttcaaattaaagctttgcaaaatgcagttgaaaaggaagtccaagcagaagacaatatctacattgagaatagtctttatgccacggactaagacccagtggtgctctttgagagtttacgcccatgactgcagaagactgaacaggtatcagcacatcagatgtcttttagactccaagacaatttttctgtttcagtttcatctggcattccaacatgtcagtgatactgggtagagtaactctcccactccaaactgtgtatagtcaacctcatcattaatgtagtcctaatttgttttgctaaaactggctcaatccttctgatcattgcagagttttctctcaaacatgaacactttagaattgtatgttctctttagaccccataaatcctgtat

SEQ ID NO: 215 - protein, 359 aa, Homo sapiens
MHPQVVILSLILHLADSVAGSVKVGGEAGPSVTLPCHYSGAVTSMCWNRGSCSLFTCQNGIVWTNGTHVTYRKDTRYKLLGDLSRRDVSLTIENTAVSDSGVYCCRVEHRGWFNDMKITVSLEIVPPKVTTTPIVTTVPTVTTVRTSTTVPTTTTVPTTTVPTTMSIPTTTTVPTTMTVSTTTSVPTTTSIPTTTSVPVTTTVSTFVPPMPLPRQNHEPVATSPSSPQPAETHPTTLQGAIRREPTSSPLYSYTTDGNDTVTESSDGLWNNNQTQLFLEHSLLTANTTKGIYAGVCISVLVLLALLGVIIAKKYFFKKEVQQLSVSFSSLQIKALQNAVEKEVQAEDNIYIENSLYATD

SEQ ID NO: 216 - DNA, 2671 bp, Homo sapiens
ggtgagtcaccaaggaaggcagcggcagctccactcagccactgcaattgtgtccggaatttattccttctggtgggttcatggtcttgctgacttcaagaatgaagccgctgacctcgcgcataattagcatcatcattattctggctggagcaattgcactcatcattggctttggtatttcagggagacactccatcacagtcactactgtcgcctcagctgggaacattggggaggatggaatcctgagctgcacttttgaacctgacatcaaactttctgatatcgtgatacaatggctgaaggaaggtgttttaggcttggtccatgagttcaaagaaggcaaagatgagctgtcggagcaggatgaaatgttcagaggccggacagcagtgtttgctgatcaagtgatagttggcaatgcctctttgcggctgaaaaacgtgcaactcacagatgctggcacctacaaatgttatatcatcacttctaaaggcaaggggaatgctaaccttgagtataaaactggagccttcagcatgccggaagtgaatgtggactataatgccagctcagagaccttgcggtgtgaggctccccgatggttcccccggcccacagtggtctgggcatcccaagttgaccagggagccaacttctcggaagtctccaataccagctttgagctgaactctgagaatgtgaccatgaaggtagtgtctgtgctctacaatgttacgatcaacaacacatactcctgtatggttgaaaatgacattgccaaagcaacaggggatatcaaagtgacagaatcggagatcaaaaggcggagtcacctacagctgctaaactcaaaggcttctctgtgtgtctcttctttctttgccatcagctgggcacttctgcctctcagcccttacctgatgctaaaataatgtgccttggccacaaaaaagcatgcaaagtcattgttacaacagggatctacagaactatttcaccaccagatatgacctagttttatatttctgggaggaaatgaattcatatctagaagtctggagtgagcaaacaagagcaagaaacaaaaagaagccaaaagcagaaggctccaatatgaacaagataaatctatcttcaaagacatattagaagttgggaaaataattcatgtgaactagacaagtgtgttaagagtgataagtaaaatgcacgtggagacaagtgcatccccagatctcagggacctccccctgcctgtcacctggggagtgagaggacaggatagtgcatgttctttgtctctgaatttttagttatatgtgccgtaatgttgctctgaggaagcccctggaaagtctatcccaacatatccacatcttatattccacaaattaagctgtagtatgtaccctaagacgctgctaattgactgccacttcgcaactcaggggcggctgcattttagtaatgggtcaaatgattcactttttatgatgcttccaaaggtgccttggcttctcttcccaactgacaaatgccaaagttgagaaaaatgatcataattttagcataaacagagcagtcggcgacaccgattttataaataaactgagcaccttctttttaaacaaacaaatgcgggtttatttctcagatgatgttcatccgtgaatggtccagggaaggacctttcaccttgtctatatggcattatgtcatcacaagctctgaggcttctcctttccatcctgcgtggacagctaagacctcagttttcaatagcatctagagcagtgggactcagctggggtgatttcgccccccatctccgggggaatgtctgaagacaattttggttacctcaatgagggagtggaggaggatacagtgccactaccaactagtggatagaggccagggatgctgctcaacctcctaccatgtacaggacgtctccccattacaactacccaatccgaagtgtcaactgtgtcagggctaaggaaccctggttttgagtagaaaagggcctggaaagaggggagccaacaaatctgtctgcttcctcacattagtcattggcaaataagcattctgtctctttggctgctgcctcagcacagagagccagaactctatcgggcaccaggataacatctctcagtgaacagagttgacaaggcctatgggaaatgcctgatgggattatcttcagcttgttgagcttctaagtttctttcccttcattctaccctgcaagccaagttctgtaagagaaatgcctgagttctagctcaggttttcttactctgaatttagatctccagaccctgcctggccacaattcaaattaaggcaacaaacatataccttccatgaagcacacacagacttttgaaagcaaggacaatgactgcttgaattgaggccttgaggaatgaagctttgaaggaaaagaatactttgtttccagcccccttcccacactcttcatgtgttaaccactgccttcctggaccttggagccacggtgactgtattacatgttgttatagaaaactgattttagagttctgatcgttcaagagaatgattaaatatacatttcctacaaaaaaaaaaaaaaaaaaaaaaaaaaaaaaaaaataaaaaaaaaaaaaaaaaa

SEQ ID NO: 217 - DNA, 1164 bp, Homo sapiens
agtggggccaggggagtcatctttttccgttgcgggtacccacctgccgctggccagcattgccccagaggcatccttgggtggctgcttgtataaactgcaaggtccacaaagtgttgaacaagttgttgaatgttttggccaacactgcacctgctgtcttccctacagatttgcaggctgggaaggctagacttcctcagcccgagggctgcccttccaaactctatcggctgatgcagcgctgctgggccctcagccccaaggaccggccctccttcagtgagattgccagcgccctgggagacagcaccgtggacagcaagccgtgaggagggagcccgctcaggatggcctgggcaggggaggacatctctagagggaagctcacagcatgatgggcaagatccctgtcctcctgggccctgaggcccctgccctagtgcaacaggcattgctgaggtctgagcagggcctggcctttcctcctcttcctcaccctcatcctttgggaggctgacttggacccaaactgggcgactagggctttgagctgggcagttttccctgccacctcttcctctatcagggacagtgtgggtgccacaggtaaccccaatttctggccttcaacttctccccttgaccgggtccaactctgccactcatctgccaactttgcctggggagggctaggcttgggatgagctgggtttgtggggagttccttaatattctcaagttctgggcacacagggttaatgagtctcttggcccactggtcccacttgggggtctagaccaggattatagaggacacagcaagtgagtcctccccactctgggcttgtgcacactgacccagacccacgtcttccccacccttctctcctttcctcatcctaagtgcctggcagatgaaggagttttcaggagcttttgacactatataaaccgccctttttgtatgcaccacgggcggcttttatatgtaattgcagcgtggggtgggtgggcatgggaggtaggggtgggccctggagatgaggagggtgggccatccttaccccacacttttattgttgtcgttttttgtttgtttttgtttttttgtttttgtttttgtttttacactcgctgctctcaataaataagcctttttta

SEQ ID NO: 218 - protein, 1070 aa, Homo sapiens
MGAARGSPARPRRLPLLSVLLLPLLGGTQTAIVFIKQPSSQDALQGRRALLRCEVEAPGPVHVYWLLDGAPVQDTERRFAQGSSLSFAAVDRLQDSGTFQCVARDDVTGEEARSANASFNIKWIEAGPVVLKHPASEAEIQPQTQVTLRCHIDGHPRPTYQWFRDGTPLSDGQSNHTVSSKERNLTLRPAGPEHSGLYSCCAHSAFGQACSSQNFTLSIADESFARVVLAPQDVVVARYEEAMFHCQFSAQPPPSLQWLFEDETPITNRSRPPHLRRATVFANGSLLLTQVRPRNAGIYRCIGQGQRGPPIILEATLHLAEIEDMPLFEPRVFTAGSEERVTCLPPKGLPEPSVWWEHAGVRLPTHGRVYQKGHELVLANIAESDAGVYTCHAANLAGQRRQDVNITVATVPSWLKKPQDSQLEEGKPGYLDCLTQATPKPTVVWYRNQMLISEDSRFEVFKNGTLRINSVEVYDGTWYRCMSSTPAGSIEAQARVQVLEKLKFTPPPQPQQCMEFDKEATVPCSATGREKPTIKWERADGSSLPEWVTDNAGTLHFARVTRDDAGNYTCIASNGPQGQIRAHVQLTVAVFITFKVEPERTTVYQGHTALLQCEAQGDPKPLIQWKGKDRILDPTKLGPRMHIFQNGSLVIHDVAPEDSGRYTCIAGNSCNIKHTEAPLYVVDKPVPEESEGPGSPPPYKMIQTIGLSVGAAVAYIIAVLGLMFYCKKRCKAKRLQKQPEGEEPEMECLNGGPLQNGQPSAEIQEEVALTSLGSGPAATNKRHSTSDKMHFPRSSLQPITTLGKSEFGEVFLAKAQGLEEGVAETLVLVKSLQSKDEQQQLDFRRELEMFGKLNHANVVRLLGLCREAEPHYMVLEYVDLGDLKQFLRISKSKDEKLKSQPLSTKQKVALCTQVALGMEHLSNNRFVHKDLAARNCLVSAQRQVKVSALGLSKDVYNSEYYHFRQAWVPLRWMSPEAILEGDFSTKSDVWAFGVLMWEVFTHGEMPHGGQADDEVLADLQAGKARLPQPEGCPSKLYRLMQRCWALSPKDRPSFSEIASALGDSTVDSKP

SEQ ID NO: 219 - DNA, 1229 bp, Homo sapiens
ttcctttctctctcagctctccgtctctctttctctctcagcctctttctttctccctgtctcccccactgtcagcacctcttctgtgtggtgagtggaccgcttaccccactaggtgaagatgtcagcccaggagagctgcctcagcctcatcaagtcctcggcagcctgatcttctgcttcggcatctggatcctcattgacaagaccagcttcgtgtcctttgtgggcttggccttcgtgcctctgcagatctggtccaaagtcctggccatctcaggaatcttcaccatgggcatcgccctcctgggttgtgtgggggccctcaaggagctccgctgcctcctgggcctgtattttgggatgctgctgctcctgtttgccacacagatcaccctgggaatcctcatctccactcagcgggcccagctggagcgaagcttgcgggacgtcgtagagaaaaccatccaaaagtacggcaccaaccccgaggagaccgcggccgaggagagctgggactatgtgcagttccagctgcgctgctgcggctggcactacccgcaggactggttccaagtcctcatcctgagaggtaacgggtcggaggcgcaccgcgtgccctgctcctgctacaacttgtcggcgaccaacgactccacaatcctagataaggtgatcttgccccagctcagcaggcttggacacctggcgcggtccagacacagtgcagacatctgcgctgtccctgcagagagccacatctaccgcgagggctgcgcgcagggcctccagaagtggctgcacaacaaccttatttccatagtgggcatttgcctgggcgtcggcctactcgagctcgggttcatgacgctctcgatattcctgtgcagaaacctggaccacgtctacaaccggctcgctcgataccgttaggccccgccctccccaaagtcccgccccgcccccgtcacgtgcgctgggcacttccctgctgcctgtaaatatttgtttaatccccagttcgcctggagccctccgccttcacattcccctggggacccacgtggctgcgtgcccctgctgctgtcacctctcccacgggacctggggctttcgtccacagcttcctgtccccatctgtcggcctaccaccacccacaagattatttttcacccaaacctcaaataaatcccctgcgtttttggtaaaaaaaaaaaaaaaaaaaaaa

SEQ ID NO: 220 - protein, 213 aa, Homo sapiens
MGIALLGCVGALKELRCLLGLYFGMLLLLFATQITLGILISTQRAQLERSLRDVVEKTIQKYGTNPEETAAEESWDYVQFQLRCCGWHYPQDWFQVLILRGNGSEAHRVPCSCYNLSATNDSTILDKVILPQLSRLGHLARSRHSADICAVPAESHIYREGCAQGLQKWLHNNLISIVGICLGVGLLELGFMTLSIFLCRNLDHVYNRLARYR

SEQ ID NO: 221 - DNA, 3148 bp, Homo sapiens
gtgggaagggcctgtgggtttattataaggcggagctcggcgggagaggtgcgggccgaatccgagccgagcggagaggaatccggcagtagagagcggactccagccggcggaccctgcagccctcgcctgggacagcggcgcgctgggcaggcgcccaagagagcatcgagcagcggaacccgcgaagccggcccgcagccgcgacccgcgcagcctgccgctctcccgccgccggtccgggcagcatgaggcgcgcggcgctctggctctggctgtgcgcgctggcgctgagcctgcagccggccctgccgcaaattgtggctactaatttgccccctgaagatcaagatggctctggggatgactctgacaacttctccggctcaggtgcaggtgctttgcaagatatcaccttgtcacagcagaccccctccacttggaaggacacgcagctcctgacggctattcccacgtctccagaacccaccggcctggaggctacagctgcctccacctccaccctgccggctggagaggggcccaaggagggagaggctgtagtcctgccagaagtggagcctggcctcaccgcccgggagcaggaggccaccccccgacccagggagaccacacagctcccgaccactcatcaggcctcaacgaccacagccaccacggcccaggagcccgccacctcccacccccacagggacatgcagcctggccaccatgagacctcaacccctgcaggacccagccaagctgaccttcacactccccacacagaggatggaggtccttctgccaccgagagggctgctgaggatggagcctccagtcagctcccagcagcagagggctctggggagcaggacttcacctttgaaacctcgggggagaatacggctgtagtggccgtggagcctgaccgccggaaccagtccccagtggatcagggggccacgggggcctcacagggcctcctggacaggaaagaggtgctgggaggggtcattgccggaggcctcgtggggctcatctttgctgtgtgcctggtgggtttcatgctgtaccgcatgaagaagaaggacgaaggcagctactccttggaggagccgaaacaagccaacggcggggcctaccagaagcccaccaaacaggaggaattctatgcctgacgcgggagccatgcgccccctccgccctgccactcactaggcccccacttgcctcttccttgaagaactgcaggccctggcctcccctgccaccaggccacctccccagcattccagcccctctggtcgctcctgcccacggagtcgtggggtgtgctgggagctccactctgcttctctgacttctgcctggagacttagggcaccaggggtttctcgcataggacctttccaccacagccagcacctggcatcgcaccattctgactcggtttctccaaactgaagcagcctctccccaggtccagctctggaggggagggggatccgactgctttggacctaaatggcctcatgtggctggaagatcctgcgggtggggcttggggctcacacacctgtagcacttactggtaggaccaagcatcttgggggggtggccgctgagtggcaggggacaggagtccactttgtttcgtggggaggtctaatctagatatcgacttgtttttgcacatgtttcctctagttctttgttcatagcccagtagaccttgttacttctgaggtaagttaagtaagttgattcggtatccccccatcttgcttccctaatctatggtcgggagacagcatcagggttaagaagacttttttttttttttttaaactaggagaaccaaatctggaagccaaaatgtaggcttagtttgtgtgttgtctcttgagtttgtcgctcatgtgtgcaacagggtatggactatctgtctggtggccccgtttctggtggtctgttggcaggctggccagtccaggctgccgtggggccgccgcctctttcaagcagtcgtgcctgtgtccatgcgctcagggccatgctgaggcctgggccgctgccacgttggagaagcccgtgtgagaagtgaatgctgggactcagccttcagacagagaggactgtagggagggcggcaggggcctggagatcctcctgcagaccacgcccgtcctgcctgtggcgccgtctccaggggctgcttcctcctggaaattgacgaggggtgtcttgggcagagctggctctgagcgcctccatccaaggccaggttctccgttagctcctgtggccccaccctgggccctgggctggaatcaggaatattttccaaagagtgatagtcttttgcttttggcaaaactctacttaatccaatgggtttttccctgtacagtagattttccaaatgtaataaactttaatataaagtagtcctgtgaatgccactgccttcgcttcttgcctctgtgctgtgtgtgacgtgaccggacttttctgcaaacaccaacatgttgggaaacttggctcgaatctctgtgccttcgtctttcccatggggagggattctggttccagggtccctctgtgtatttgcttttttgttttggctgaaattctcctggaggtcggtaggttcagccaaggttttataaggctgatgtcaatttctgtgttgccaagctccaagccccatcttctaaatggcaaaggaaggtggatggccccagcacagcttgacctgaggctgtggtcacagcggaggtgtggagccgaggcctaccccgcagacaccttggacatcctcctcccacccggctgcagaggccagaggcccccagcccagggctcctgcacttacttgcttatttgacaacgtttcagcgactccgttggccactccgagaggtgggccagtctgtggatcagagatgcaccaccaagccaagggaacctgtgtccggtattcgatactgcgactttctgcctggagtgtatgactgcacatgactcgggggtggggaaaggggtcggctgaccatgctcatctgctggtccgtgggacggtgcccaagccagaggctgggttcatttgtgtaacgacaataaacggtacttgtcatttcgggca

SEQ ID NO: 222 - protein, 310 aa, Homo sapiens
MRRAALWLWLCALALSLQPALPQIVATNLPPEDQDGSGDDSDNFSGSGAGALQDITLSQQTPSTWKDTQLLTAIPTSPEPTGLEATAASTSTLPAGEGPKEGEAVVLPEVEPGLTAREQEATPRPRETTQLPTTHQASTTTATTAQEPATSHPHRDMQPGHHETSTPAGPSQADLHTPHTEDGGPSATERAAEDGASSQLPAAEGSGEQDFTFETSGENTAVVAVEPDRRNQSPVDQGATGASQGLLDRKEVLGGVIAGGLVGLIFAVCLVGFMLYRMKKKDEGSYSLEEPKQANGGAYQKPTKQEEFYA

SEQ ID NO: 223 - DNA, 1506 bp, Homo sapiens
ctgcctggggagcccccccgccccacatcctgccccgcaaaaggcagcttcaccaaagtggggtatttccagcctttgtagctttcacttccacatctaccaagtgggcggagtggccttctgtggacgaatcagattcctctccagcaccgactttaagaggcgagccggggggtcagggtcccagatgcacaggaggagaagcaggagctgtcgggaagatcagaagccagtcatggatgaccagcgcgaccttatctccaacaatgagcaactgcccatgctgggccggcgccctggggccccggagagcaagtgcagccgcggagccctgtacacaggcttttccatcctggtgactctgctcctcgctggccaggccaccaccgcctacttcctgtaccagcagcagggccggctggacaaactgacagtcacctcccagaacctgcagctggagaacctgcgcatgaagcttcccaagcctcccaagcctgtgagcaagatgcgcatggccaccccgctgctgatgcaggcgctgcccatgggagccctgccccaggggcccatgcagaatgccaccaagtatggcaacatgacagaggaccatgtgatgcacctgctccagaatgctgaccccctgaaggtgtacccgccactgaaggggagcttcccggagaacctgagacaccttaagaacaccatggagaccatagactggaaggtctttgagagctggatgcaccattggctcctgtttgaaatgagcaggcactccttggagcaaaagcccactgacgctccaccgaaagagtcactggaactggaggacccgtcttctgggctgggtgtgaccaagcaggatctgggcccagtccccatgtgagagcagcagaggcggtcttcaacatcctgccagccccacacagctacagctttcttgctcccttcagcccccagcccctcccccatctcccaccctgtacctcatcccatgagaccctggtgcctggctctttcgtcacccttggacaagacaaaccaagtcggaacagcagataacaatgcagcaaggccctgctgcccaatctccatctgtcaacaggggcgtgaggtcccaggaagtggccaaaagctagacagatccccgttcctgacatcacagcagcctccaacacaaggctccaagacctaggctcatggacgagatgggaaggcacagggagaagggataaccctacacccagaccccaggctggacatgctgactgtcctctcccctccagcctttggccttggcttttctagcctatttacctgcaggctgagccactctcttccctttccccagcatcactccccaaggaagagccaatgttttccacccataatcctttctgccgacccctagttccctctgctcagccaagcttgttatcagctttcagggccatggttcacattagaataaaaggtagtaattagaacaaaaaaaaaaaaaaaaaa

SEQ ID NO: 224 - protein, 232 aa, Homo sapiens
MHRRRSRSCREDQKPVMDDQRDLISNNEQLPMLGRRPGAPESKCSRGALYTGFSILVTLLLAGQATTAYFLYQQQGRLDKLTVTSQNLQLENLRMKLPKPPKPVSKMRMATPLLMQALPMGALPQGPMQNATKYGNMTEDHVMHLLQNADPLKVYPPLKGSFPENLRHLKNTMETIDWKVFESWMHHWLLFEMSRHSLEQKPTDAPPKESLELEDPSSGLGVTKQDLGPVPM

SEQ ID NO: 225 - DNA, 5616 bp, Homo sapiens
ccccggcgcagcgcggccgcagcagcctccgccccccgcacggtgtgagcgcccgacgcggccgaggcggccggagtcccgagctagccccggcggccgccgccgcccagaccggacgacaggccacctcgtcggcgtccgcccgagtccccgcctcgccgccaacgccacaaccaccgcgcacggccccctgactccgtccagtattgatcgggagagccggagcgagctcttcggggagcagcgatgcgaccctccgggacggccggggcagcgctcctggcgctgctggctgcgctctgcccggcgagtcgggctctggaggaaaagaaagtttgccaaggcacgagtaacaagctcacgcagttgggcacttttgaagatcattttctcagcctccagaggatgttcaataactgtgaggtggtccttgggaatttggaaattacctatgtgcagaggaattatgatctttccttcttaaagaccatccaggaggtggctggttatgtcctcattgccctcaacacagtggagcgaattcctttggaaaacctgcagatcatcagaggaaatatgtactacgaaaattcctatgccttagcagtcttatctaactatgatgcaaataaaaccggactgaaggagctgcccatgagaaatttacaggaaatcctgcatggcgccgtgcggttcagcaacaaccctgccctgtgcaacgtggagagcatccagtggcgggacatagtcagcagtgactttctcagcaacatgtcgatggacttccagaaccacctgggcagctgccaaaagtgtgatccaagctgtcccaatgggagctgctggggtgcaggagaggagaactgccagaaactgaccaaaatcatctgtgcccagcagtgctccgggcgctgccgtggcaagtcccccagtgactgctgccacaaccagtgtgctgcaggctgcacaggcccccgggagagcgactgcctggtctgccgcaaattccgagacgaagccacgtgcaaggacacctgccccccactcatgctctacaaccccaccacgtaccagatggatgtgaaccccgagggcaaatacagctttggtgccacctgcgtgaagaagtgtccccgtaattatgtggtgacagatcacggctcgtgcgtccgagcctgtggggccgacagctatgagatggaggaagacggcgtccgcaagtgtaagaagtgcgaagggccttgccgcaaagtgtgtaacggaataggtattggtgaatttaaagactcactctccataaatgctacgaatattaaacacttcaaaaactgcacctccatcagtggcgatctccacatcctgccggtggcatttaggggtgactccttcacacatactcctcctctggatccacaggaactggatattctgaaaaccgtaaaggaaatcacagggtttttgctgattcaggcttggcctgaaaacaggacggacctccatgcctttgagaacctagaaatcatacgcggcaggaccaagcaacatggtcagttttctcttgcagtcgtcagcctgaacataacatccttgggattacgctccctcaaggagataagtgatggagatgtgataatttcaggaaacaaaaatttgtgctatgcaaatacaataaactggaaaaaactgtttgggacctccggtcagaaaaccaaaattataagcaacagaggtgaaaacagctgcaaggccacaggccaggtctgccatgccttgtgctcccccgagggctgctggggcccggagcccagggactgcgtctcttgccggaatgtcagccgaggcagggaatgcgtggacaagtgcaaccttctggagggtgagccaagggagtttgtggagaactctgagtgcatacagtgccacccagagtgcctgcctcaggccatgaacatcacctgcacaggacggggaccagacaactgtatccagtgtgcccactacattgacggcccccactgcgtcaagacctgcccggcaggagtcatgggagaaaacaacaccctggtctggaagtacgcagacgccggccatgtgtgccacctgtgccatccaaactgcacctacggatgcactgggccaggtcttgaaggctgtccaacgaatgggcctaagatcccgtccatcgccactgggatggtgggggccctcctcttgctgctggtggtggccctggggatcggcctcttcatgcgaaggcgccacatcgttcggaagcgcacgctgcggaggctgctgcaggagagggagcttgtggagcctcttacacccagtggagaagctcccaaccaagctctcttgaggatcttgaaggaaactgaattcaaaaagatcaaagtgctgggctccggtgcgttcggcacggtgtataagggactctggatcccagaaggtgagaaagttaaaattcccgtcgctatcaaggaattaagagaagcaacatctccgaaagccaacaaggaaatcctcgatgaagcctacgtgatggccagcgtggacaacccccacgtgtgccgcctgctgggcatctgcctcacctccaccgtgcagctcatcacgcagctcatgcccttcggctgcctcctggactatgtccgggaacacaaagacaatattggctcccagtacctgctcaactggtgtgtgcagatcgcaaagggcatgaactacttggaggaccgtcgcttggtgcaccgcgacctggcagccaggaacgtactggtgaaaacaccgcagcatgtcaagatcacagattttgggctggccaaactgctgggtgcggaagagaaagaataccatgcagaaggaggcaaagtgcctatcaagtggatggcattggaatcaattttacacagaatctatacccaccagagtgatgtctggagctacggggtgaccgtttgggagttgatgacctttggatccaagccatatgacggaatccctgccagcgagatctcctccatcctggagaaaggagaacgcctccctcagccacccatatgtaccatcgatgtctacatgatcatggtcaagtgctggatgatagacgcagatagtcgcccaaagttccgtgagttgatcatcgaattctccaaaatggcccgagacccccagcgctaccttgtcattcagggggatgaaagaatgcatttgccaagtcctacagactccaacttctaccgtgccctgatggatgaagaagacatggacgacgtggtggatgccgacgagtacctcatcccacagcagggcttcttcagcagcccctccacgtcacggactcccctcctgagctctctgagtgcaaccagcaacaattccaccgtggcttgcattgatagaaatgggctgcaaagctgtcccatcaaggaagacagcttcttgcagcgatacagctcagaccccacaggcgccttgactgaggacagcatagacgacaccttcctcccagtgcctgaatacataaaccagtccgttcccaaaaggcccgctggctctgtgcagaatcctgtctatcacaatcagcctctgaaccccgcgcccagcagagacccacactaccaggacccccacagcactgcagtgggcaaccccgagtatctcaacactgtccagcccacctgtgtcaacagcacattcgacagccctgcccactgggcccagaaaggcagccaccaaattagcctggacaaccctgactaccagcaggacttctttcccaaggaagccaagccaaatggcatctttaagggctccacagctgaaaatgcagaatacctaagggtcgcgccacaaagcagtgaatttattggagcatgaccacggaggatagtatgagccctaaaaatccagactctttcgatacccaggaccaagccacagcaggtcctccatcccaacagccatgcccgcattagctcttagacccacagactggttttgcaacgtttacaccgactagccaggaagtacttccacctcgggcacattttgggaagttgcattcctttgtcttcaaactgtgaagcatttacagaaacgcatccagcaagaatattgtccctttgagcagaaatttatctttcaaagaggtatatttgaaaaaaaaaaaaagtatatgtgaggatttttattgattggggatcttggagtttttcattgtcgctattgatttttacttcaatgggctcttccaacaaggaagaagcttgctggtagcacttgctaccctgagttcatccaggcccaactgtgagcaaggagcacaagccacaagtcttccagaggatgcttgattccagtggttctgcttcaaggcttccactgcaaaacactaaagatccaagaaggccttcatggccccagcaggccggatcggtactgtatcaagtcatggcaggtacagtaggataagccactctgtcccttcctgggcaaagaagaaacggaggggatggaattcttccttagacttacttttgtaaaaatgtccccacggtacttactccccactgatggaccagtggtttccagtcatgagcgttagactgacttgtttgtcttccattccattgttttgaaactcagtatgctgcccctgtcttgctgtcatgaaatcagcaagagaggatgacacatcaaataataactcggattccagcccacattggattcatcagcatttggaccaatagcccacagctgagaatgtggaatacctaaggatagcaccgcttttgttctcgcaaaaacgtatctcctaatttgaggctcagatgaaatgcatcaggtcctttggggcatagatcagaagactacaaaaatgaagctgctctgaaatctcctttagccatcaccccaaccccccaaaattagtttgtgttacttatggaagatagttttctccttttacttcacttcaaaagctttttactcaaagagtatatgttccctccaggtcagctgcccccaaaccccctccttacgctttgtcacacaaaaagtgtctctgccttgagtcatctattcaagcacttacagctctggccacaacagggcattttacaggtgcgaatgacagtagcattatgagtagtgtggaattcaggtagtaaatatgaaactagggtttgaaattgataatgctttcacaacatttgcagatgttttagaaggaaaaaagttccttcctaaaataatttctctacaattggaagattggaagattcagctagttaggagcccaccttttttcctaatctgtgtgtgccctgtaacctgactggttaacagcagtcctttgtaaacagtgttttaaactctcctagtcaatatccaccccatccaatttatcaaggaagaaatggttcagaaaatattttcagcctacagttatgttcagtcacacacacatacaaaatgttccttttgcttttaaagtaatttttgactcccagatcagtcagagcccctacagcattgttaagaaagtatttgatttttgtctcaatgaaaataaaactatattcatttccactctaaaaaaaaaaaaaaaaa

SEQ ID NO: 226 - protein, 1210 aa, Homo sapiens [sequence omitted]

SEQ ID NO: 227 - DNA, 4975 bp, Homo sapiens
ctctcacacacacacacccctcccctgccatccctccccggactccggctccggctccgattgcaatttgcaacctccgctgccgtcgccgcagcagccaccaattcgccagcggttcaggtggctcttgcctcgatgtcctagcctaggggcccccgggccggacttggctgggctcccttcaccctctgcggagtcatgagggcgaacgacgctctgcaggtgctgggcttgcttttcagcctggcccggggctccgaggtgggcaactctcaggcagtgtgtcctgggactctgaatggcctgagtgtgaccggcgatgctgagaaccaataccagacactgtacaagctctacgagaggtgtgaggtggtgatggggaaccttgagattgtgctcacgggacacaatgccgacctctccttcctgcagtggattcgagaagtgacaggctatgtcctcgtggccatgaatgaattctctactctaccattgcccaacctccgcgtggtgcgagggacccaggtctacgatgggaagtttgccatcttcgtcatgttgaactataacaccaactccagccacgctctgcgccagctccgcttgactcagctcaccgagattctgtcagggggtgtttatattgagaagaacgataagctttgtcacatggacacaattgactggagggacatcgtgagggaccgagatgctgagatagtggtgaaggacaatggcagaagctgtcccccctgtcatgaggtttgcaaggggcgatgctggggtcctggatcagaagactgccagacattgaccaagaccatctgtgctcctcagtgtaatggtcactgctttgggcccaaccccaaccagtgctgccatgatgagtgtgccgggggctgctcaggccctcaggacacagactgctttgcctgccggcacttcaatgacagtggagcctgtgtacctcgctgtccacagcctcttgtctacaacaagctaactttccagctggaacccaatccccacaccaagtatcagtatggaggagtttgtgtagccagctgtccccataactttgtggtggatcaaacatcctgtgtcagggcctgtcctcctgacaagatggaagtagataaaaatgggctcaagatgtgtgagccttgtgggggactatgtcccaaagcctgtgagggaacaggctctgggagccgcttccagactgtggactcgagcaacattgatggatttgtgaactgcaccaagatcctgggcaacctggactttctgatcaccggcctcaatggagacccctggcacaagatccctgccctggacccagagaagctcaatgtcttccggacagtacgggagatcacaggttacctgaacatccagtcctggccgccccacatgcacaacttcagtgttttttccaatttgacaaccattggaggcagaagcctctacaaccggggcttctcattgttgatcatgaagaacttgaatgtcacatctctgggcttccgatccctgaaggaaattagtgctgggcgtatctatataagtgccaataggcagctctgctaccaccactctttgaactggaccaaggtgcttcgggggcctacggaagagcgactagacatcaagcataatcggccgcgcagagactgcgtggcagagggcaaagtgtgtgacccactgtgctcctctgggggatgctggggcccaggccctggtcagtgcttgtcctgtcgaaattatagccgaggaggtgtctgtgtgacccactgcaactttctgaatggggagcctcgagaatttgcccatgaggccgaatgcttctcctgccacccggaatgccaacccatggggggcactgccacatgcaatggctcgggctctgatacttgtgctcaatgtgcccattttcgagatgggccccactgtgtgagcagctgcccccatggagtcctaggtgccaagggcccaatctacaagtacccagatgttcagaatgaatgtcggccctgccatgagaactgcacccaggggtgtaaaggaccagagcttcaagactgtttaggacaaacactggtgctgatcggcaaaacccatctgacaatggctttgacagtgatagcaggattggtagtgattttcatgatgctgggcggcacttttctctactggcgtgggcgccggattcagaataaaagggctatgaggcgatacttggaacggggtgagagcatagagcctctggaccccagtgagaaggctaacaaagtcttggccagaatcttcaaagagacagagctaaggaagcttaaagtgcttggctcgggtgtctttggaactgtgcacaaaggagtgtggatccctgagggtgaatcaatcaagattccagtctgcattaaagtcattgaggacaagagtggacggcagagttttcaagctgtgacagatcatatgctggccattggcagcctggaccatgcccacattgtaaggctgctgggactatgcccagggtcatctctgcagcttgtcactcaatatttgcctctgggttctctgctggatcatgtgagacaacaccggggggcactggggccacagctgctgctcaactggggagtacaaattgccaagggaatgtactaccttgaggaacatggtatggtgcatagaaacctggctgcccgaaacgtgctactcaagtcacccagtcaggttcaggtggcagattttggtgtggctgacctgctgcctcctgatgataagcagctgctatacagtgaggccaagactccaattaagtggatggcccttgagagtatccactttgggaaatacacacaccagagtgatgtctggagctatggtgtgacagtttgggagttgatgaccttcggggcagagccctatgcagggctacgattggctgaagtaccagacctgctagagaagggggagcggttggcacagccccagatctgcacaattgatgtctacatggtgatggtcaagtgttggatgattgatgagaacattcgcccaacctttaaagaactagccaatgagttcaccaggatggcccgagacccaccacggtatctggtcataaagagagagagtgggcctggaatagcccctgggccagagccccatggtctgacaaacaagaagctagaggaagtagagctggagccagaactagacctagacctagacttggaagcagaggaggacaacctggcaaccaccacactgggctccgccctcagcctaccagttggaacacttaatcggccacgtgggagccagagccttttaagtccatcatctggatacatgcccatgaaccagggtaatcttggggggtcttgccaggagtctgcagtttctgggagcagtgaacggtgcccccgtccagtctctctacacccaatgccacggggatgcctggcatcagagtcatcagaggggcatgtaacaggctctgaggctgagctccaggagaaagtgtcaatgtgtagaagccggagcaggagccggagcccacggccacgcggagatagcgcctaccattcccagcgccacagtctgctgactcctgttaccccactctccccacccgggttagaggaagaggatgtcaacggttatgtcatgccagatacacacctcaaaggtactccctcctcccgggaaggcaccctttcttcagtgggtctcagttctgtcctgggtactgaagaagaagatgaagatgaggagtatgaatacatgaaccggaggagaaggcacagtccacctcatccccctaggccaagttcccttgaggagctgggttatgagtacatggatgtggggtcagacctcagtgcctctctgggcagcacacagagttgcccactccaccctgtacccatcatgcccactgcaggcacaactccagatgaagactatgaatatatgaatcggcaacgagatggaggtggtcctgggggtgattatgcagccatgggggcctgcccagcatctgagcaagggtatgaagagatgagagcttttcaggggcctggacatcaggccccccatgtccattatgcccgcctaaaaactctacgtagcttagaggctacagactctgcctttgataaccctgattactggcatagcaggcttttccccaaggctaatgcccagagaacgtaactcctgctccctgtggcactcagggagcatttaatggcagctagtgcctttagagggtaccgtcttctccctattccctctctctcccaggtcccagccccttttccccagtcccagacaattccattcaatctttggaggcttttaaacattttgacacaaaattcttatggtatgtagccagctgtgcactttcttctctttcccaaccccaggaaaggttttccttattttgtgtgctttcccagtcccattcctcagcttcttcacaggcactcctggagatatgaaggattactctccatatcccttcctctcaggctcttgactacttggaactaggctcttatgtgtgcctttgtttcccatcagactgtcaagaagaggaaagggaggaaacctagcagaggaaagtgtaattttggtttatgactcttaaccccctagaaagacagaagcttaaaatctgtgaagaaagaggttaggagtagatattgattactatcataattcagcacttaactatgagccaggcatcatactaaacttcacctacattatctcacttagtcctttatcatccttaaaacaattctgtgacatacatattatctcattttacacaaagggaagtcgggcatggtggctcatgcctgtaatctcagcactttgggaggctgaggcagaaggattacctgaggcaaggagtttgagaccagcttagccaacatagtaagacccccatctc

SEQ ID NO: 228 - protein, 1342 aa, Homo sapiens
MRANDALQVLGLLFSLARGSEVGNSQAVCPGTLNGLSVTGDAENQYQTLYKLYERCEVVMGNLEIVLTGHNADLSFLQWIREVTGYVLVAMNEFSTLPLPNLRVVRGTQVYDGKFAIFVMLNYNTNSSHALRQLRLTQLTEILSGGVYIEKNDKLCHMDTIDWRDIVRDRDAEIVVKDNGRSCPPCHEVCKGRCWGPGSEDCQTLTKTICAPQCNGHCFGPNPNQCCHDECAGGCSGPQDTDCFACRHFNDSGACVPRCPQPLVYNKLTFQLEPNPHTKYQYGGVCVASCPHNFVVDQTSCVRACPPDKMEVDKNGLKMCEPCGGLCPKACEGTGSGSRFQTVDSSNIDGFVNCTKILGNLDFLITGLNGDPWHKIPALDPEKLNVFRTVREITGYLNIQSWPPHMHNFSVFSNLTTIGGRSLYNRGFSLLIMKNLNVTSLGFRSLKEISAGRIYISANRQLCYHHSLNWTKVLRGPTEERLDIKHNRPRRDCVAEGKVCDPLCSSGGCWGPGPGQCLSCRNYSRGGVCVTHCNFLNGEPREFAHEAECFSCHPECQPMGGTATCNGSGSDTCAQCAHFRDGPHCVSSCPHGVLGAKGPIYKYPDVQNECRPCHENCTQGCKGPELQDCLGQTLVLIGKTHLTMALTVIAGLVVIFMMLGGTFLYWRGRRIQNKRAMRRYLERGESIEPLDPSEKANKVLARIFKETELRKLKVLGSGVFGTVHKGVWIPEGESIKIPVCIKVIEDKSGRQSFQAVTDHMLAIGSLDHAHIVRLLGLCPGSSLQLVTQYLPLGSLLDHVRQHRGALGPQLLLNWGVQIAKGMYYLEEHGMVHRNLAARNVLLKSPSQVQVADFGVADLLPPDDKQLLYSEAKTPIKWMALESIHFGKYTHQSDVWSYGVTVWELMTFGAEPYAGLRLAEVPDLLEKGERLAQPQICTIDVYMVMVKCWMIDENIRPTFKELANEFTRMARDPPRYLVIKRESGPGIAPGPEPHGLTNKKLEEVELEPELDLDLDLEAEEDNLATTTLGSALSLPVGTLNRPRGSQSLLSPSSGYMPMNQGNLGGSCQESAVSGSSERCPRPVSLHPMPRGCLASESSEGHVTGSEAELQEKVSMCRSRSRSRSPRPRGDSAYHSQRHSLLTPVTPLSPPGLEEEDVNGYVMPDTHLKGTPSSREGTLSSVGLSSVLGTEEEDEDEEYEYMNRRRRHSPPHPPRPSSLEELGYEYMDVGSDLSASLGSTQSCPLHPVPIMPTAGTTPDEDYEYMNRQRDGGGPGGDYAAMGACPASEQGYEEMRAFQGPGHQAPHVHYARLKTLRSLEATDSAFDNPDYWHSRLFPKANAQRT

SEQ ID NO: 229 - DNA, 4541 bp, Homo sapiens
ggatcctctagggtcccagctcgcctcgatggagctcctcccgccgctgcctcagtccttcctgttgctgctgctgttgcctgccaagcccgcggcgggcgaggactggcagtgcccgcgcaccccctacgcggcctctcgcgactttgacgtgaagtacgtggtgcccagcttctccgccggaggcctggtacaggccatggtgacctacgagggcgacagaaatgagagtgctgtgtttgtagccatacgcaatcgcctgcatgtgcttgggcctgacctgaagtctgtccagagcctggccacgggccctgctggagaccctggctgccagacgtgtgcagcctgtggcccaggaccccacggccctcccggtgacacagacacaaaggtgctggtgctggatcccgcgctgcctgcgctggtcagttgtggctccagcctgcagggccgctgcttcctgcatgacctagagccccaagggacagccgtgcatctggcagcgccagcctgcctcttctcagcccaccataaccggcccgatgactgccccgactgtgtggccagcccattgggcacccgtgtaactgtggttgagcaaggccaggcctcctatttctacgtggcatcctcactggacgcagccgtggctggcagcttcagcccacgctcagtgtctatcaggcgtctcaaggctgacgcctcgggattcgcaccgggctttgtggcgttgtcagtgctgcccaagcatcttgtctcctacagtattgaatacgtgcacagcttccacacgggagccttcgtatacttcctgactgtacagccggccagcgtgacagatgatcctagtgccctgcacacacgcctggcacggcttagcgccactgagccagagttgggtgactatcgggagctggtcctcgactgcagatttgctccaaaacgcaggcgccggggggccccagaaggcggacagccctaccctgtgctgcaggtggcccactccgctccagtgggtgcccaacttgccactgagctgagcatcgccgagggccaggaagtactatttggggtctttgtgactggcaaggatggtggtcctggcgtgggccccaactctgtcgtctgtgccttccccattgacctgctggacacactaattgatgagggtgtggagcgctgttgtgaatccccagtccatccaggcctccggcgaggcctcgacttcttccagtcgcccagtttttgccccaacccgcctggcctggaagccctcagccccaacaccagctgccgccacttccctctgctggtcagtagcagcttctcacgtgtggacctattcaatgggctgttgggaccagtacaggtcactgcattgtatgtgacacgccttgacaacgtcacagtggcacacatgggcacaatggatgggcgtatcctgcaggtggagctggtcaggtcactaaactacttgctgtatgtgtccaacttctcactgggtgacagtgggcagcccgtgcagcgggatgtcagtcgtcttggggaccacctactctttgcctctggggaccaggttttccaggtacctatccgaggccctggctgccgccacttcctgacctgtgggcgttgcctaagggcatggcatttcatgggctgtggctggtgtgggaacatgtgcggccagcagaaggagtgtcctggctcctggcaacaggaccactgcccacctaagcttactgagttccacccccacagtggacctctaaggggcagtacaaggctgaccctgtgtggctccaacttctaccttcacccttctggtctggtgcctgagggaacccatcaggtcactgtgggccaaagtccctgccggccactgcccaaggacagctcaaaactcagaccagtgccccggaaagactttgtagaggagtttgagtgtgaactggagcccttgggcacccaggcagtggggcctaccaacgtcagcctcaccgtgactaacatgccaccgggcaagcacttccgggtagacggcacctccgtgctgagaggcttctctttcatggagccagtgctgatagcagtgcaacccctctttggcccacgggcaggaggcacctgtctcactcttgaaggccagagtctgtctgtaggcaccagccgggctgtgctggtcaatgggactgagtgtctgctagcacgggtcagtgaggggcagcttttatgtgccacaccccctggggccacggtggccagtgtcccccttagcctgcaggtggggggtgcccaggtacctggttcctggaccttccagtacagagaagaccctgtcgtgctaagcatcagccccaactgtggctacatcaactcccacatcaccatctgtggccagcatctaacttcagcatggcacttagtgctgtcattccatgacgggcttagggcagtggaaagcaggtgtgagaggcagcttccagagcagcagctgtgccgccttcctgaatatgtggtccgagacccccagggatgggtggcagggaatctgagtgcccgaggggatggagctgctggctttacactgcctggctttcgcttcctacccccaccccatccacccagtgccaacctagttccactgaagcctgaggagcatgccattaagtttgagtatattgggctgggcgctgtggctgactgtgtgggtatcaacgtgaccgtgggtggtgagagctgccagcacgagttccggggggacatggttgtctgccccctgcccccatccctgcagcttggccaggatggtgccccattgcaggtctgcgtagatggtgaatgtcatatcctgggtagagtggtgcggccagggccagatggggtcccacagagcacgctccttggtatcctgctgcctttgctgctgcttgtggctgcactggcgactgcactggtcttcagctactggtggcggaggaagcagctagttcttcctcccaacctgaatgacctggcatccctggaccagactgctggagccacacccctgcctattctgtactcgggctctgactacagaagtggccttgcactccctgccattgatggtctggattccaccacttgtgtccatggagcatccttctccgatagtgaagatgaatcctgtgtgccactgctgcggaaagagtccatccagctaagggacctggactctgcgctcttggctgaggtcaaggatgtgctgattccccatgagcgggtggtcacccacagtgaccgagtcattggcaaaggccactttggagttgtctaccacggagaatacatagaccaggcccagaatcgaatccaatgtgccatcaagtcactaagtcgcatcacagagatgcagcaggtggaggccttcctgcgagaggggctgctcatgcgtggcctgaaccacccgaatgtgctggctctcattggtatcatgttgccacctgagggcctgccccatgtgctgctgccctatatgtgccacggtgacctgctccagttcatccgctcacctcagcggaaccccaccgtgaaggacctcatcagctttggcctgcaggtagcccgcggcatggagtacctggcagagcagaagtttgtgcacagggacctggctgcgcggaactgcatgctggacgagtcattcacagtcaaggtggctgactttggtttggcccgcgacatcctggacagggagtactatagtgttcaacagcatcgccacgctcgcctacctgtgaagtggatggcgctggagagcctgcagacctatagatttaccaccaagtctgatgtgtggtcatttggtgtgctgctgtgggaactgctgacacggggtgccccaccataccgccacattgacccttttgaccttacccacttcctggcccagggtcggcgcctgccccagcctgagtattgccctgattctctgtaccaagtgatgcagcaatgctgggaggcagacccagcagtgcgacccaccttcagagtactagtgggggaggtggagcagatagtgtctgcactgcttggggaccattatgtgcagctgccagcaacctacatgaacttgggccccagcacctcgcatgagatgaatgtgcgtccagaacagccgcagttctcacccatgccagggaatgtacgccggccccggccactctcagagcctcctcggcccacttgacttagttcttgggctggacctgcttagctgccttgagctaaccccaaggctgcctctgggccatgccaggccagagcagtggccctccaccttgttcctgccctttaactttcagaggcaataggtaaatgggcccattaggtccctcactccacagagtgagccagtgagggcagtcctgcaacatgtatttatggagtgcctgctgtggaccctgtcttctgggcacagtggactcagcagtgaccacaccaacactgacccttgaaccaataaaggaacaaatgactattaaagcacaaaaaaaaaa

SEQ ID NO: 230 - protein, 1400 aa, Homo sapiens
MELLPPLPQSFLLLLLLPAKPAAGEDWQCPRTPYAASRDFDVKYVVPSFSAGGLVQAMVTYEGDRNESAVFVAIRNRLHVLGPDLKSVQSLATGPAGDPGCQTCAACGPGPHGPPGDTDTKVLVLDPALPALVSCGSSLQGRCFLHDLEPQGTAVHLAAPACLFSAHHNRPDDCPDCVASPLGTRVTVVEQGQASYFYVASSLDAAVAGSFSPRSVSIRRLKADASGFAPGFVALSVLPKHLVSYSIEYVHSFHTGAFVYFLTVQPASVTDDPSALHTRLARLSATEPELGDYRELVLDCRFAPKRRRRGAPEGGQPYPVLQVAHSAPVGAQLATELSIAEGQEVLFGVFVTGKDGGPGVGPNSVVCAFPIDLLDTLIDEGVERCCESPVHPGLRRGLDFFQSPSFCPNPPGLEALSPNTSCRHFPLLVSSSFSRVDLFNGLLGPVQVTALYVTRLDNVTVAHMGTMDGRILQVELVRSLNYLLYVSNFSLGDSGQPVQRDVSRLGDHLLFASGDQVFQVPIRGPGCRHFLTCGRCLRAWHFMGCGWCGNMCGQQKECPGSWQQDHCPPKLTEFHPHSGPLRGSTRLTLCGSNFYLHPSGLVPEGTHQVTVGQSPCRPLPKDSSKLRPVPRKDFVEEFECELEPLGTQAVGPTNVSLTVTNMPPGKHFRVDGTSVLRGFSFMEPVLIAVQPLFGPRAGGTCLTLEGQSLSVGTSRAVLVNGTECLLARVSEGQLLCATPPGATVASVPLSLQVGGAQVPGSWTFQYREDPVVLSISPNCGYINSHITICGQHLTSAWHLVLSFHDGLRAVESRCERQLPEQQLCRLPEYVVRDPQGWVAGNLSARGDGAAGFTLPGFRFLPPPHPPSANLVPLKPEEHAIKFEYIGLGAVADCVGINVTVGGESCQHEFRGDMVVCPLPPSLQLGQDGAPLQVCVDGECHILGRVVRPGPDGVPQSTLLGILLPLLLLVAALATALVFSYWWRRKQLVLPPNLNDLASLDQTAGATPLPILYSGSDYRSGLALPAIDGLDSTTCVHGASFSDSEDESCVPLLRKESIQLRDLDSALLAEVKDVLIPHERVVTHSDRVIGKGHFGVVYHGEYIDQAQNRIQCAIKSLSRITEMQQVEAFLREGLLMRGLNHPNVLALIGIMLPPEGLPHVLLPYMCHGDLLQFIRSPQRNPTVKDLISFGLQVARGMEYLAEQKFVHRDLAARNCMLDESFTVKVADFGLARDILDREYYSVQQHRHARLPVKWMALESLQTYRFTTKSDVWSFGVLLWELLTRGAPPYRHIDPFDLTHFLAQGRRLPQPEYCPDSLYQVMQQCWEADPAVRPTFRVLVGEVEQIVSALLGDHYVQLPATYMNLGPSTSHEMNVRPEQPQFSPMPGNVRRPRPLSEPPRPT

SEQ ID NO: 231 - protein, 976 aa, Homo sapiens
MELQAARACFALLWGCALAAAAAAQGKEVVLLDFAAAGGELGWLTHPYGKGWDLMQNIMNDMPIYMYSVCNVMSGDQDNWLRTNWVYRGEAERIFIELKFTVRDCNSFPGGASSCKETFNLYYAESDLDYGTNFQKRLFTKIDTIAPDEITVSSDFEARHVKLNVEERSVGPLTRKGFYLAFQDIGACVALLSVRVYYKKCPELLQGLAHFPETIAGSDAPSLATVAGTCVDHAVVPPGGEEPRMHCAVDGEWLVPIGQCLCQAGYEKVEDACQACSPGFFKFEASESPCLECPEHTLPSPEGATSCECEEGFFRAPQDPASMPCTRPPSAPHYLTAVGMGAKVELRWTPPQDSGGREDIVYSVTCEQCWPESGECGPCEASVRYSEPPHGLTRTSVTVSDLEPHMNYTFTVEARNGVSGLVTSRSFRTASVSINQTEPPKVRLEGRSTTSLSVSWSIPPPQQSRVWKYEVTYRKKGDSNSYNVRRTEGFSVTLDDLAPDTTYLVQVQALTQEGQGAGSKVHEFQTLSPEGSGNLAVIGGVAVGVVLLLVLAGVGFFIHRRRKNQRARQSPEDVYFSKSEQLKPLKTYVDPHTYEDPNQAVLKFTTEIHPSCVTRQKVIGAGEFGEVYKGMLKTSSGKKEVPVAIKTLKAGYTEKQRVDFLGEAGIMGQFSHHNIIRLEGVISKYKPMMIITEYMENGALDKFLREKDGEFSVLQLVGMLRGIAAGMKYLANMNYVHRDLAARNILVNSNLVCKVSDFGLSRVLEDDPEATYTTSGGKIPIRWTAPEAISYRKFTSASDVWSFGIVMWEVMTYGERPYWELSNHEVMKAINDGFRLPTPMDCPSAIYQLMMQCWQQERARRPKFADIVSILDKLIRAPDSLKTLADFDPRVSIRLPSTSGSEGVPFRTVSEWLESIKMQQYTEHFMAAGYTAIEKVVQMTNDDIKRIGVRLPGHQKRIAYSLLGLKDQVNTVGIPI

SEQ ID NO: 232 - DNA, 1146 bp, Homo sapiens
cctcaatgacactcatggaggaaatgctgagagaagcattcagatgcatgacacaaggtaagactgccaaaaatcttgttcttgctctcctcattttgttatttgttttatttttaggagttttgagagcaaaatgacaacacccagaaattcagtaaatgggactttcccggcagagccaatgaaaggccctattgctatgcaatctggtccaaaaccactcttcaggaggatgtcttcactggtgggccccacgcaaagcttcttcatgagggaatctaagactttgggggctgtccagattatgaatgggctcttccacattgccctggggggtcttctgatgatcccagcagggatctatgcacccatctgtgtgactgtgtggtaccctctctggggaggcattatgtatattatttccggatcactcttggcagcaacggagaaaaactctaggaagtgtttggtcaaaggaaaaatgataatgaattcattgagcctctttgctgccatttctggaatgattctttcaatcatggacatacttaatattaaaatttcccattttttaaaaatggagagtctgaattttattagagctcacacaccatatattaacatatacaactgtgaaccagctaatccctctgagaaaaactccccatctacccaatactgttacagcatacaatctctgttcttgggcattttgtcagtgatgctgatctttgccttcttccaggaacttgtaatagctggcatcgttgagaatgaatggaaaagaacgtgctccagacccaaatctaacatagttctcctgtcagcagaagaaaaaaaagaacagactattgaaataaaagaagaagtggttgggctaactgaaacatcttcccaaccaaagaatgaagaagacattgaaattattccaatccaagaagaggaagaagaagaaacagagacgaactttccagaacctccccaagatcaggaatcctcaccaatagaaaatgacagctctccttaagtgatttcttctgttttctgtttccttttttaaacattagtgttcatagcttccaagagacatgctgactttcatttcttgaggtactctgcacatacgcaccacatctctatctggcc

SEQ ID NO: 233 - protein, 297 aa, Homo sapiens
MTTPRNSVNGTFPAEPMKGPIAMQSGPKPLFRRMSSLVGPTQSFFMRESKTLGAVQIMNGLFHIALGGLLMIPAGIYAPICVTVWYPLWGGIMYIISGSLLAATEKNSRKCLVKGKMIMNSLSLFAAISGMILSIMDILNIKISHFLKMESLNFIRAHTPYINIYNCEPANPSEKNSPSTQYCYSIQSLFLGILSVMLIFAFFQELVIAGIVENEWKRTCSRPKSNIVLLSAEEKKEQTIEIKEEVVGLTETSSQPKNEEDIEIIPIQEEEEEETETNFPEPPQDQESSPIENDSSP

SEQ ID NO: 234 - DNA, 8605 bp, Homo sapiens
aattcgccaactgaaaaagtgggaaaggatgtctggaggcgaggcgtcccattacagaggaaggagctcgctatataagccagccaaagttggctgcaccggccacagcctgcctactgtcacccgcctctcccgcgcgcagatacacgcccccgcctccgtgggcacaaaggcagcgctgctggggaactcgggggaacgcgcacgtgggaaccgccgcagctccacactccaggtacttcttccaaggacctaggtctctcgcccatcggaaagaaaataattctttcaagaagatcagggacaactgatttgaagtctactctgtgcttctaaatccccaattctgctgaaagtgagataccctagagccctagagccccagcagcacccagccaaacccacctccaccatgggggccatgactcagctgttggcaggtgtctttcttgctttccttgccctcgctaccgaaggtggggtcctcaagaaagtcatccggcacaagcgacagagtggggtgaacgccaccctgccagaagagaaccagccagtggtgtttaaccacgtttacaacatcaagctgccagtgggatcccagtgttcggtggatctggagtcagccagtggggagaaagacctggcaccgccttcagagcccagcgaaagctttcaggagcacacagtggatggggaaaaccagattgtcttcacacatcgcatcaacatcccccgccgggcctgtggctgtgccgcagcccctgatgttaaggagctgctgagcagactggaggagctggagaacctggtgtcttccctgagggagcaatgtactgcaggagcaggctgctgtctccagcctgccacaggccgcttggacaccaggcccttctgtagcggtcggggcaacttcagcactgaaggatgtggctgtgtctgcgaacctggctggaaaggccccaactgctctgagcccgaatgtccaggcaactgtcaccttcgaggccggtgcattgatgggcagtgcatctgtgacgacggcttcacgggcgaggactgcagccagctggcttgccccagcgactgcaatgaccagggcaagtgcgtaaatggagtctgcatctgtttcgaaggctacgccggggctgactgcagccgtgaaatctgcccagtgccctgcagtgaggagcacggcacatgtgtagatggcttgtgtgtgtgccacgatggctttgcaggcgatgactgcaacaagcctctgtgtctcaacaattgctacaaccgtggacgatgcgtggagaatgagtgcgtgtgtgatgagggtttcacgggcgaagactgcagtgagctcatctgccccaatgactgcttcgaccggggccgctgcatcaatggcacctgctactgcgaagaaggcttcacaggtgaagactgcgggaaacccacctgcccacatgcctgccacacccagggccggtgtgaggaggggcagtgtgtatgtgatgagggctttgccggtgtggactgcagcgagaagaggtgtcctgctgactgtcacaatcgtggccgctgtgtagacgggcggtgtgagtgtgatgatggtttcactggagctgactgtggggagctcaagtgtcccaatggctgcagtggccatggccgctgtgtcaatgggcagtgtgtgtgtgatgagggctatactggggaggactgcagccagctacggtgccccaatgactgtcacagtcggggccgctgtgtcgagggcaaatgtgtatgtgagcaaggcttcaagggctatgactgcagtgacatgagctgccctaatgactgtcaccagcacggccgctgtgtgaatggcatgtgtgtttgtgatgacggctacacaggggaagactgccgggatcgccaatgccccagggactgcagcaacaggggcctctgtgtggacggacagtgcgtctgtgaggacggcttcaccggccctgactgtgcagaactctcctgtccaaatgactgccatggccagggtcgctgtgtgaatgggcagtgcgtgtgccatgaaggatttatgggcaaagactgcaaggagcaaagatgtcccagtgactgtcatggccagggccgctgcgtggacggccagtgcatctgccacgagggcttcacaggcctggactgtggccagcactcctgccccagtgactgcaacaacttaggacaatgcgtctcgggccgctgcatctgcaacgagggctacagcggagaagactgctcagaggtgtctcctcccaaagacctcgttgtgacagaagtgacggaagagacggtcaacctggcctgggacaatgagatgcgggtcacagagtaccttgtcgtgtacacgcccacccacgagggtggtctggaaatgcagttccgtgtgcctggggaccagacgtccaccatcatccaggagctggagcctggtgtggagtactttatccgtgtatttgccatcctggagaacaagaagagcattcctgtcagcgccagggtggccacgtacttacctgcacctgaaggcctgaaattcaagtccatcaaggagacatctgtggaagtggagtgggatcctctagacattgcttttgaaacctgggagatcatcttccggaatatgaataaagaagatgagggagagatcaccaaaagcctgaggaggccagagacctcttaccggcaaactggtctagctcctgggcaagagtatgagatatctctgcacatagtgaaaaacaatacccggggccctggcctgaagagggtgaccaccacacgcttggatgcccccagccagatcgaggtgaaagatgtcacagacaccactgccttgatcacctggttcaagcccctggctgagatcgatggcattgagctgacctacggcatcaaagacgtgccaggagaccgtaccaccatcgatctcacagaggacgagaaccagtactccatcgggaacctgaagcctgacactgagtacgaggtgtccctcatctcccgcagaggtgacatgtcaagcaacccagccaaagagaccttcacaacaggcctcgatgctcccaggaatcttcgacgtgtttcccagacagataacagcatcaccctggaatggaggaatggcaaggcagctattgacagttacagaattaagtatgcccccatctctggaggggaccacgctgaggttgatgttccaaagagccaacaagccacaaccaaaaccacactcacaggtctgaggccgggaactgaatatgggattggagtttctgctgtgaaggaagacaaggagagcaatccagcgaccatcaacgcagccacagagttggacacgcccaaggaccttcaggtttctgaaactgcagagaccagcctgaccctgctctggaagacaccgttggccaaatttgaccgctaccgcctcaattacagtctccccacaggccagtgggtgggagtgcagcttccaagaaacaccacttcctatgtcctgagaggcctggaaccaggacaggagtacaatgtcctcctgacagccgagaaaggcagacacaagagcaagcccgcacgtgtgaaggcatccactgaacaagcccctgagctggaaaacctcaccgtgactgaggttggctgggatggcctcagactcaactggaccgcagctgaccaggcctatgagcactttatcattcaggtgcaggaggccaacaaggtggaggcagctcggaacctcaccgtgcctggcagccttcgggctgtggacataccgggcctcaaggctgctacgccttatacagtctccatctatggggtgatccagggctatagaacaccagtgctctctgctgaggcctccacaggggaaactcccaatttgggagaggtcgtggtggccgaggtgggctgggatgccctcaaactcaactggactgctccagaaggggcctatgagtactttttcattcaggtgcaggaggctgacacagtagaggcagcccagaacctcaccgtcccaggaggactgaggtccacagacctgcctgggctcaaagcagccactcattataccatcaccatccgcggggtcactcaggacttcagcacaacccctctctctgttgaagtcttgacagaggaggttccagatatgggaaacctcacagtgaccgaggttagctgggatgctctcagactgaactggaccacgccagatggaacctatgaccagtttactattcaggtccaggaggctgaccaggtggaagaggctcacaatctcacggttcctggcagcctgcgttccatggaaatcccaggcctcagggctggcactccttacacagtcaccctgcacggcgaggtcaggggccacagcactcgaccccttgctgtagaggtcgtcacagaggatctcccacagctgggagatttagccgtgtctgaggttggctgggatggcctcagactcaactggaccgcagctgacaatgcctatgagcactttgtcattcaggtgcaggaggtcaacaaagtggaggcagcccagaacctcacgttgcctggcagcctcagggctgtggacatcccgggcctcgaggctgccacgccttatagagtctccatctatggggtgatccggggctatagaacaccagtactctctgctgaggcctccacagccaaagaacctgaaattggaaacttaaatgtttctgacataactcccgagagcttcaatctctcctggatggctaccgatgggatcttcgagacctttaccattgaaattattgattccaataggttgctggagactgtggaatataatatctctggtgctgaacgaactgcccatatctcagggctaccccctagtactgattttattgtctacctctctggacttgctcccagcatccggaccaaaaccatcagtgccacagccacgacagaggccctgccccttctggaaaacctaaccatttccgacattaatccctacgggttcacagtttcctggatggcatcggagaatgcctttgacagctttctagtaacggtggtggattctgggaagctgctggacccccaggaattcacactttcaggaacccagaggaagctggagcttagaggcctcataactggcattggctatgaggttatggtctctggcttcacccaagggcatcaaaccaagcccttgagggctgagattgttacagaagccgaaccggaagttgacaaccttctggtttcagatgccaccccagacggtttccgtctgtcctggacagctgatgaaggggtcttcgacaattttgttctcaaaatcagagataccaaaaagcagtctgagccactggaaataaccctacttgcccccgaacgtaccagggacataacaggtctcagagaggctactgaatacgaaattgaactctatggaataagcaaaggaaggcgatcccagacagtcagtgctatagcaacaacagccatgggctccccaaaggaagtcattttctcagacatcactgaaaattcggctactgtcagctggagggcacccacagcccaagtggagagcttccggattacctatgtgcccattacaggaggtacaccctccatggtaactgtggacggaaccaagactcagaccaggctggtgaaactcatacctggcgtggagtaccttgtcagcatcatcgccatgaagggctttgaggaaagtgaacctgtctcagggtcattcaccacagctctggatggcccatctggcctggtgacagccaacatcactgactcagaagccttggccaggtggcagccagccattgccactgtggacagttatgtcatctcctacacaggcgagaaagtgccagaaattacacgcacggtgtccgggaacacagtggagtatgctctgaccgacctcgagcctgccacggaatacacactgagaatctttgcagagaaagggccccagaagagctcaaccatcactgccaagttcacaacagacctcgattctccaagagacttgactgctactgaggttcagtcggaaactgccctccttacctggcgacccccccgggcatcagtcaccggttacctgctggtctatgaatcagtggatggcacagtcaaggaagtcattgtgggtccagataccacctcctacagcctggcagacctgagcccatccacccactacacagccaagatccaggcactcaatgggcccctgaggagcaatatgatccagaccatcttcaccacaattggactcctgtaccccttccccaaggactgctcccaagcaatgctgaatggagacacgacctctggcctctacaccatttatctgaatggtgataaggctgaggcgctggaagtcttctgtgacatgacctctgatgggggtggatggattgtgttcctgagacgcaaaaacggacgcgagaacttctaccaaaactggaaggcatatgctgctggatttggggaccgcagagaagaattctggcttgggctggacaacctgaacaaaatcacagcccaggggcagtacgagctccgggtggacctgcgggaccatggggagacagcctttgctgtctatgacaagttcagcgtgggagatgccaagactcgctacaagctgaaggtggaggggtacagtgggacagcaggtgactccatggcctaccacaatggcagatccttctccacctttgacaaggacacagattcagccatcaccaactgtgctctgtcctacaaaggggctttctggtacaggaactgtcaccgtgtcaacctgatggggagatatggggacaataaccacagtcagggcgttaactggttccactggaagggccacgaacactcaatccagtttgctgagatgaagctgagaccaagcaacttcagaaatcttgaaggcaggcgcaaacgggcataaattccagggaccactgggtgagagaggaataaggcccagagcgaggaaaggattttaccaaagcatcaatacaaccagcccaaccatcggtccacacctgggcatttggtgagagtcaaagctgaccatggatccctggggccaacggcaacagcatgggcctcacctcctctgtgatttctttctttgcaccaaagacatcagtctccaacatgtttctgttttgttgtttgattcagcaaaaatctcccagtgacaacatcgcaatagttttttacttctcttaggtggctctgggaatgggagaggggtaggatgtacaggggtagtttgttttagaaccagccgtattttacatgaagctgtataattaattgtcattatttttgttagcaaagattaaatgtgtcattggaagccatccctttttttacatttcatacaacagaaaccagaaaagcaatactgtttccattttaaggatatgattaatattattaatataataatgatgatgatgatgatgaaaactaaggatttttcaagagatctttctttccaaaacatttctggacagtacctgattgtattttttttttaaataaaagcacaagtacttttgagtttgttattttgctttgaattgttgagtctgaatttcaccaaagccaatcatttgaacaaagcggggaatgttgggataggaaaggtaagtagggatagtggtcaagtgggaggggtggaaaggagactaaagactgggagagagggaagcactttttttaaataaagttgaacacacttgggaaaagcttacaggccaggcctgtaatcccaacactttgggaggccaaggtgggaggatagcttaaccccaggagtttgagaccagcctgagcaacatagtgagaacttgtctctacagaaaaaaaaaaaaaaaaaaatttaattaggcaagcgtggtagtgcgcacctgtcgtcccagctactcaggaggctgaggtaggaaaatcactggagcccaggagttagaggttacagtgagctatgatcacactactgcactccagcctgggcaacagagggagaccctgtctctaaataaaaaaagaaaagaaaaaaaaagcttacaacttgagattcagcatcttgctcagtatttccaagactaatagattatggtttaaaagatgcttttatactcattttctaatgcaactcctagaaactctatgatatagttgaggtaagtattgttaccacacatgggctaagatccccagaggcagactgcctgagttcaattcttggctccaccattcccaagttccctaacctctctatgcctcagtttcctcttctgtaaagtagggacactcatacttctcatttcagaacatttttgtgaagaataaattatgttatccatttgaggcccttagaatggtacccggtgtatattaagtgctagtacatgttagctatcatcattatcactttatatgagatggactggggttcatagaaacccaatgacttgattgtggctactactcaataaataatagaatttggatttaaaaaaaa

SEQ ID NO: 235 - protein, 2201 aa, Homo sapiens
MGAMTQLLAGVFLAFLALATEGGVLKKVIRHKRQSGVNATLPEENQPVVFNHVYNIKLPVGSQCSVDLESASGEKDLAPPSEPSESFQEHTVDGENQIVFTHRINIPRRACGCAAAPDVKELLSRLEELENLVSSLREQCTAGAGCCLQPATGRLDTRPFCSGRGNFSTEGCGCVCEPGWKGPNCSEPECPGNCHLRGRCIDGQCICDDGFTGEDCSQLACPSDCNDQGKCVNGVCICFEGYAGADCSREICPVPCSEEHGTCVDGLCVCHDGFAGDDCNKPLCLNNCYNRGRCVENECVCDEGFTGEDCSELICPNDCFDRGRCINGTCYCEEGFTGEDCGKPTCPHACHTQGRCEEGQCVCDEGFAGVDCSEKRCPADCHNRGRCVDGRCECDDGFTGADCGELKCPNGCSGHGRCVNGQCVCDEGYTGEDCSQLRCPNDCHSRGRCVEGKCVCEQGFKGYDCSDMSCPNDCHQHGRCVNGMCVCDDGYTGEDCRDRQCPRDCSNRGLCVDGQCVCEDGFTGPDCAELSCPNDCHGQGRCVNGQCVCHEGFMGKDCKEQRCPSDCHGQGRCVDGQCICHEGFTGLDCGQHSCPSDCNNLGQCVSGRCICNEGYSGEDCSEVSPPKDLVVTEVTEETVNLAWDNEMRVTEYLVVYTPTHEGGLEMQFRVPGDQTSTIIQELEPGVEYFIRVFAILENKKSIPVSARVATYLPAPEGLKFKSIKETSVEVEWDPLDIAFETWEIIFRNMNKEDEGEITKSLRRPETSYRQTGLAPGQEYEISLHIVKNNTRGPGLKRVTTTRLDAPSQIEVKDVTDTTALITWFKPLAEIDGIELTYGIKDVPGDRTTIDLTEDENQYSIGNLKPDTEYEVSLISRRGDMSSNPAKETFTTGLDAPRNLRRVSQTDNSITLEWRNGKAAIDSYRIKYAPISGGDHAEVDVPKSQQATTKTTLTGLRPGTEYGIGVSAVKEDKESNPATINAATELDTPKDLQVSETAETSLTLLWKTPLAKFDRYRLNYSLPTGQWVGVQLPRNTTSYVLRGLEPGQEYNVLLTAEKGRHKSKPARVKASTEQAPELENLTVTEVGWDGLRLNWTAADQAYEHFIIQVQEANKVEAARNLTVPGSLRAVDIPGLKAATPYTVSIYGVIQGYRTPVLSAEASTGETPNLGEVVVAEVGWDALKLNWTAPEGAYEYFFIQVQEADTVEAAQNLTVPGGLRSTDLPGLKAATHYTITIRGVTQDFSTTPLSVEVLTEEVPDMGNLTVTEVSWDALRLNWTTPDGTYDQFTIQVQEADQVEEAHNLTVPGSLRSMEIPGLRAGTPYTVTLHGEVRGHSTRPLAVEVVTEDLPQLGDLAVSEVGWDGLRLNWTAADNAYEHFVIQVQEVNKVEAAQNLTLPGSLRAVDIPGLEAATPYRVSIYGVIRGYRTPVLSAEASTAKEPEIGNLNVSDITPESFNLSWMATDGIFETFTIEIIDSNRLLETVEYNISGAERTAHISGLPPSTDFIVYLSGLAPSIRTKTISATATTEALPLLENLTISDINPYGFTVSWMASENAFDSFLVTVVDSGKLLDPQEFTLSGTQRKLELRGLITGIGYEVMVSGFTQGHQTKPLRAEIVTEAEPEVDNLLVSDATPDGFRLSWTADEGVFDNFVLKIRDTKKQSEPLEITLLAPERTRDITGLREATEYEIELYGISKGRRSQTVSAIATTAMGSPKEVIFSDITENSATVSWRAPTAQVESFRITYVPITGGTPSMVTVDGTKTQTRLVKLIPGVEYLVSIIAMKGFEESEPVSGSFTTALDGPSGLVTANITDSEALARWQPAIATVDSYVISYTGEKVPEITRTVSGNTVEYALTDLEPATEYTLRIFAEKGPQKSSTITAKFTTDLDSPRDLTATEVQSETALLTWRPPRASVTGYLLVYESVDGTVKEVIVGPDTTSYSLADLSPSTHYTAKIQALNGPLRSNMIQTIFTTIGLLYPFPKDCSQAMLNGDTTSGLYTIYLNGDKAEALEVFCDMTSDGGGWIVFLRRKNGRENFYQNWKAYAAGFGDRREEFWLGLDNLNKITAQGQYELRVDLRDHGETAFAVYDKFSVGDAKTRYKLKVEGYSGTAGDSMAYHNGRSFSTFDKDTDSAITNCALSYKGAFWYRNCHRVNLMGRYGDNNHSQGVNWFHWKGHEHSIQFAEMKLRPSNFRNLEGRRKRA

SEQ ID NO: 236 - DNA, 2814 bp, Homo sapiens
aagaacgcccccaaaatctgtttctaattttacagaaatcttttgaaacttggcacggtattcaaaagtccgtggaaagaaaaaaaccttgtcctggcttcagcttccaactacaaagacagacttggtccttttcaacggttttcacagatccagtgacccacgctctgaagacagaattagctaactttcaaaaacatctggaaaaatgaagacttgggtaaaaatcgtatttggagttgccacctctgctgtgcttgccttattggtgatgtgcattgtcttacgcccttcaagagttcataactctgaagaaaatacaatgagagcactcacactgaaggatattttaaatggaacattttcttataaaacattttttccaaactggatttcaggacaagaatatcttcatcaatctgcagataacaatatagtactttataatattgaaacaggacaatcatataccattttgagtaatagaaccatgaaaagtgtgaatgcttcaaattacggcttatcacctgatcggcaatttgtatatctagaaagtgattattcaaagctttggagatactcttacacagcaacatattacatctatgaccttagcaatggagaatttgtaagaggaaatgagcttcctcgtccaattcagtatttatgctggtcgcctgttgggagtaaattagcatatgtctatcaaaacaatatctatttgaaacaaagaccaggagatccaccttttcaaataacatttaatggaagagaaaataaaatatttaatggaatcccagactgggtttatgaagaggaaatgcttcctacaaaatatgctctctggtggtctcctaatggaaaatttttggcatatgcggaatttaatgataaggatataccagttattgcctattcctattatggcgatgaacaatatcctagaacaataaatattccatacccaaaggctggagctaagaatcccgttgttcggatatttattatcgataccacttaccctgcgtatgtaggtccccaggaagtgcctgttccagcaatgatagcctcaagtgattattatttcagttggctcacgtgggttactgatgaacgagtatgtttgcagtggctaaaaagagtccagaatgtttcggtcctgtctatatgtgacttcagggaagactggcagacatgggattgtccaaagacccaggagcatatagaagaaagcagaactggatgggctggtggattctttgtttcaagaccagttttcagctatgatgccatttcgtactacaaaatatttagtgacaaggatggctacaaacatattcactatatcaaagacactgtggaaaatgctattcaaattacaagtggcaagtgggaggccataaatatattcagagtaacacaggattcactgttttattctagcaatgaatttgaagaataccctggaagaagaaacatctacagaattagcattggaagctatcctccaagcaagaagtgtgttacttgccatctaaggaaagaaaggtgccaatattacacagcaagtttcagcgactacgccaagtactatgcacttgtctgctacggcccaggcatccccatttccacccttcatgatggacgcactgatcaagaaattaaaatcctggaagaaaacaaggaattggaaaatgctttgaaaaatatccagctgcctaaagaggaaattaagaaacttgaagtagatgaaattactttatggtacaagatgattcttcctcctcaatttgacagatcaaagaagtatcccttgctaattcaagtgtatggtggtccctgcagtcagagtgtaaggtctgtatttgctgttaattggatatcttatcttgcaagtaaggaagggatggtcattgccttggtggatggtcgaggaacagctttccaaggtgacaaactcctctatgcagtgtatcgaaagctgggtgtttatgaagttgaagaccagattacagctgtcagaaaattcatagaaatgggtttcattgatgaaaaaagaatagccatatggggctggtcctatggaggatacgtttcatcactggcccttgcatctggaactggtcttttcaaatgtggtatagcagtggctccagtctccagctgggaatattacgcgtctgtctacacagagagattcatgggtctcccaacaaaggatgataatcttgagcactataagaattcaactgtgatggcaagagcagaatatttcagaaatgtagactatcttctcatccacggaacagcagatgataatgtgcactttcaaaactcagcacagattgctaaagctctggttaatgcacaagtggatttccaggcaatgtggtactctgaccagaaccacggcttatccggcctgtccacgaaccacttatacacccacatgacccacttcctaaagcagtgtttctctttgtcagactaaaaacgatgcagatgcaagcctgtatcagaatctgaaaaccttatataaacccctcagacagtttgcttattttattttttatgttgtaaaatgctagtataaacaaacaaattaatgttgttctaaaggctgttaaaaaaaagatgaggactcagaagttcaagctaaatattgtttacattttctggtactctgtgaaagaagagaaaagggagtcatgcattttgctttggacacagtgttttatcacctgttcatttgaagaaaaataataaagtcagaagttcaaaaaaaaaaaaaaaaaaaaaaaaagcggccgctcg

SEQ ID NO: 237 - protein, 760 aa, Homo sapiens [sequence omitted]

SEQ ID NO: 238 - DNA, 1815 bp, Homo sapiens
gcagagctctgtgctccctgcagtcaggactctgggaccgcagggggctcccggaccctgactctgcagccgaaccggcacggtttcgtggggacccaggcttgcaaagtgacggtcattttctctttctttctccctcttgagtccttctgagatgatggctctgggcgcagcgggagctacccgggtctttgtcgcgatggtagcggcggctctcggcggccaccctctgctgggagtgagcgccaccttgaactcggttctcaattccaacgctatcaagaacctgcccccaccgctgggcggcgctgcggggcacccaggctctgcagtcagcgccgcgccgggaatcctgtacccgggcgggaataagtaccagaccattgacaactaccagccgtacccgtgcgcagaggacgaggagtgcggcactgatgagtactgcgctagtcccacccgcggaggggacgcaggcgtgcaaatctgtctcgcctgcaggaagcgccgaaaacgctgcatgcgtcacgctatgtgctgccccgggaattactgcaaaaatggaatatgtgtgtcttctgatcaaaatcatttccgaggagaaattgaggaaaccatcactgaaagctttggtaatgatcatagcaccttggatgggtattccagaagaaccaccttgtcttcaaaaatgtatcacaccaaaggacaagaaggttctgtttgtctccggtcatcagactgtgcctcaggattgtgttgtgctagacacttctggtccaagatctgtaaacctgtcctgaaagaaggtcaagtgtgtaccaagcataggagaaaaggctctcatggactagaaatattccagcgttgttactgtggagaaggtctgtcttgccggatacagaaagatcaccatcaagccagtaattcttctaggcttcacacttgtcagagacactaaaccagctatccaaatgcagtgaactccttttatataatagatgctatgaaaaccttttatgaccttcatcaactcaatcctaaggatatacaagttctgtggtttcagttaagcattccaataacaccttccaaaaacctggagtgtaagagctttgtttctttatggaactcccctgtgattgcagtaaattactgtattgtaaattctcagtgtggcacttacctgtaaatgcaatgaaacttttaattatttttctaaaggtgctgcactgcctatttttcctcttgttatgtaaatttttgtacacattgattgttatcttgactgacaaatattctatattgaactgaagtaaatcatttcagcttatagttcttaaaagcataaccctttaccccatttaattctagagtctagaacgcaaggatctcttggaatgacaaatgataggtacctaaaatgtaacatgaaaatactagcttattttctgaaatgtactatcttaatgcttaaattatatttccctttaggctgtgatagtttttgaaataaaatttaacatttaatatcatgaaatgttataagtagacatacattttgggattgtgatcttagaggtttgtgtgtgtgtacgtatgtgtgtgttctacaagaacggaagtgtgatatgtttaaagatgatcagagaaaagacagtgtctaaatataagacaatattgatcagctctagaataactttaaagaaagacgtgttctgcattgataaactcaaatgatcatggcagaatgagagtgaatcttacattactactttcaaaaatagtttccaataaattaataatacctaaaaaaaaaaa

SEQ ID NO: 239 - protein, 266 aa, Homo sapiens
MMALGAAGATRVFVAMVAAALGGHPLLGVSATLNSVLNSNAIKNLPPPLGGAAGHPGSAVSAAPGILYPGGNKYQTIDNYQPYPCAEDEECGTDEYCASPTRGGDAGVQICLACRKRRKRCMRHAMCCPGNYCKNGICVSSDQNHFRGEIEETITESFGNDHSTLDGYSRRTTLSSKMYHTKGQEGSVCLRSSDCASGLCCARHFWSKICKPVLKEGQVCTKHRRKGSHGLEIFQRCYCGEGLSCRIQKDHHQASNSSRLHTCQRH

SEQ ID NO: 240 - DNA, 467 bp, Homo sapiens
agacagccctgagatcacctaaaaagctgctaccaagacagccacgaagatcctaccaaaatgaagcgcttcctcttcctcctactcaccatcagcctcctggttatggtacagatacaaactggactctcaggacaaaacgacaccagccaaaccagcagcccctcagcatccagcaacataagcggaggcattttccttttcttcgtggccaatgccataatccacctcttctgcttcagttgaggtgacacgtctcagccttagccctgtgccccctgaaacagctgccaccatcactcgcaagagaatcccctccatctttgggaggggttgatgccagacatcaccaggttgtagaagttgacaggcagtgccatgggggcaacagccaaaataggggggtaatgatgtaggggccaagcagtgcccagctgggggtcaataaagttacccttgtacttgca

SEQ ID NO: 241 - protein, 61 aa, Homo sapiens
MKRFLFLLLTISLLVMVQIQTGLSGQNDTSQTSSPSASSNISGGIFLFFVANAIIHLFCFS

SEQ ID NO: 242 - protein, 335 aa, Homo sapiens
MAGSPTCLTLIYILWQLTGSAASGPVKELVGSVGGAVTFPLKSKVKQVDSIVWTFNTTPLVTIQPEGGTIIVTQNRNRERVDFPDGGYSLKLSKLKKNDSGIYYVGIYSSSLQQPSTQEYVLHVYEHLSKPKVTMGLQSNKNGTCVTNLTCCMEHGEEDVIYTWKALGQAANESHNGSILPISWRWGESDMTFICVARNPVSRNFSSPILARKLCEGAADDPDSSMVLLCLLLVPLLLSLFVLGLFLWFLKRERQEEYIEEKKRVDICRETPNICPHSGENTEYDTIPHTNRTILKEDPANTVYSTVEIPKKMENPHSLLTMPDTPRLFAYENVI

SEQ ID NO: 243 - DNA, 3292 bp, Homo sapiens
ccgcggtggtcccaatctcttccttcctccatgaggtgtctggggtcggggccccagttcttcctggagtccatctggagtctctcctactttctagagaatccattgggtcttgtttacaacgtggatggggacagactgtgcagcgtggagggaaggggagggagggaggtttgggaagagcctcctgtggggtcctgtcactgccccagatgccccaacaccctgtgatacctgcacccctgccacatctgtccctcactccaaactcagctcaaggggatggtggcagggaagaaggtgagcttggaacccaggcagccctggggtcaccacctccagctggggttcctcctctgtaaagtggaggtataacggtacccacctcctggggtggctgtgaggattcagagctgataaggtgaacgcctagggcgggccctggtgcagagagagcgctcagctcctaggctggattaactgtccctggggcacagatctcggtctggggcctgtggaaacctcagagccacccctgaacccccaccgagccacctttgcctcgcagtgccatggcctcgtctccgagttacaggaaaaggcagagaatgcccttctcaggtggccctctgggagagacactctccttgactccaaagccacgcttggctgcaaactgggccagcaccacaaggctgggcaagcaaacatcctaatcccaccaaaaccacaccgacctccaccctgtgacactctgcaacaaacacacggcctactcttgtcacccgggccggccaataagcacggaagaggcaaggcctcagaccctggacagacatcctccctccagaggcacccagggcctcagccttctcctccctccctggcctcaatttctccacctgtgacccagggcaggtggatccagggagaagaaccttctggctccatctcaccgtgggtcctgccagcacacacaaagatttggcctctcaaagcctagctctgccagcgtccttctgctcaagaactctccatgactcccagtggccctaaggacaaagtcctggcatttgaggccctcccaatgcagggccagactctgcctctccagcttcctgtccccaccacacccctgctgtctcacggtggtccgactgtttcctgcttctgttgctttgcttagtctggcaccctgctggcatgctttctcacccttcttccccaatcccaactcacccagtctttcaaagggcaggctaaataccaggcctccaggtggcccaggattcttctctgagctttcatgggcctggccctgggtgctacctgtgagtagtcccacggtgggtacatagtaggtgcgcttactgtttgcaagaatgaacatgggacagtttggggactgtcacccagctcagggagcactgatggggaagcatctcctgtatgtcccagggctcagtgctgtagtgtcctgaccctcagaaatctcataatggcttggtcaggaaggcatcgtgccccactttgcaaacagggggtgctgagaattgaggggccttgtccaaggtctcatggctaggagcaagcagaatcggatttgaacccagggccacgtgacttcagaagtgccattaaagtccccataatttggagctgtcttctttttttttttcttttctttttttttgagaccgagcctcactctgtcacctaggccaggagtgcagtggtctgatctcagctcactgcaacctccgcctcctaggttcaagtgattctctagcctcagcctcccaagtagctgggactacaggcgcacgtcatcatgcccagctaacttttgtatttttagtagagatgggttttcaccatgttggtcaggctggtctcgaactcctgacctcaagtgatccgtctgcctcggcctctcaaagtgctgggattataaggcttgagccactacactcggcctggagctgtgttttgtcggtgaaggattttccacccatgaaggggtcagacgtgaagtgtgtggccctgggcagctcctctgagcccagagacgccagccctagccgccttgctgtgccactttgggacttccctccctagcctgagcttcagttttcctgcctgttaggcagccccatgtcaactgcacttagtaggccgggtttgatgcccgacaagacgtgaagtggtggaggtgggcaggatcccagcgctaccatcttcttgaaccagtgatctcaacacatcggatttctgtttcctcatctgcaaaatgggatcagtgagctcaggtgggtcacaaattctacaggaactactttagccaagcccggccccctgaaagttcccctcggtgggctgttagggtgattgttttcatctgtggggctcctgatgcgtcccacccaccagccttggagagggtgggatgggagggtggggtgcttggggagacaagcctagagcctgggcctcccaccccactgcctccccccatcccagggccccccacccagtgacaaagcccgtggcacttcctctacccggttggcaggcggcctggcccagccccttctctaaggaagcgcatttcctgcctccctgggccggccgggctggatgagccgggagctccctgctgccggtcataccacagccttcatctgcgccctggggccaggactgctgctgtcactgccatccattggagcccagcaccccctccccgcccatccttcggacagcaactccagcccagccccgcgtccctgtgtccacttctcctgaccctcggccgccaccccagaaggctggagcagggacgccgtcgctccggccgcctgctcccctcgggtccccgtgcgagcccacgccggccccggtgcccgcccgcagccctgccactggacacaggataaggcccagcgcacaggcccccacgtggacagcatggaccgcggcacgctccctctggctgttgccctgctgctggccagctgcagcctcagccccacaagtaggtgtccagggacccagggtggggagactcggcctccggtgcacggaccaggccccaagtattcccggcctccttcctgtatcctgagctcacgcccagcagagccatccttggggctctggagggtcaccaaccctcccagtttgctggaactaaatggttatgcaggactttcagtgttgaaagaaagcctcgggcaaactgggctgactctttcactttaaccctggtctctggcgtctgctcacccagctg

SEQ ID NO: 244 - protein, 22 aa, Homo sapiens
MDRGTLPLAVALLLASCSLSPT

SEQ ID NO: 245 - DNA, 1399 bp, Homo sapiens
agtgtgaaatcttcagagaagaatttctctttagttctttgcaagaaggtagagataaagacactttttcaaaaatggcaatggtatcagaattcctcaagcaggcctggtttattgaaaatgaagagcaggaatatgttcaaactgtgaagtcatccaaaggtggtcccggatcagcggtgagcccctatcctaccttcaatccatcctcggatgtcgctgccttgcataaggccataatggttaaaggtgtggatgaagcaaccatcattgacattctaactaagcgaaacaatgcacagcgtcaacagatcaaagcagcatatctccaggaaacaggaaagcccctggatgaaacacttaagaaagcccttacaggtcaccttgaggaggttgttttagctctgctaaaaactccagcgcaatttgatgctgatgaacttcgtgctgccatgaagggccttggaactgatgaagatactctaattgagattttggcatcaagaactaacaaagaaatcagagacattaacagggtctacagagaggaactgaagagagatctggccaaagacataacctcagacacatctggagattttcggaacgctttgctttctcttgctaagggtgaccgatctgaggactttggtgtgaatgaagacttggctgattcagatgccagggccttgtatgaagcaggagaaaggagaaaggggacagacgtaaacgtgttcaataccatccttaccaccagaagctatccacaacttcgcagagtgtttcagaaatacaccaagtacagtaagcatgacatgaacaaagttctggacctggagttgaaaggtgacattgagaaatgcctcacagctatcgtgaagtgcgccacaagcaaaccagctttctttgcagagaagcttcatcaagccatgaaaggtgttggaactcgccataaggcattgatcaggattatggtttcccgttctgaaattgacatgaatgatatcaaagcattctatcagaagatgtatggtatctccctttgccaagccatcctggatgaaaccaaaggagattatgagaaaatcctggtggctctttgtggaggaaactaaacattcccttgatggtctcaagctatgatcagaagactttaattatatattttcatcctataagcttaaataggaaagtttcttcaacaggattacagtgtagctacctacatgctgaaaaatatagcctttaaatcatttttatattataactctgtataatagagataagtccattttttaaaaatgttttccccaaaccataaaaccctatacaagttgttctagtaacaatacatgagaaagatgtctatgtagctgaaaataaaatgacgtcacaagac

SEQ ID NO: 246 - protein, 346 aa, Homo sapiens
MAMVSEFLKQAWFIENEEQEYVQTVKSSKGGPGSAVSPYPTFNPSSDVAALHKAIMVKGVDEATIIDILTKRNNAQRQQIKAAYLQETGKPLDETLKKALTGHLEEVVLALLKTPAQFDADELRAAMKGLGTDEDTLIEILASRTNKEIRDINRVYREELKRDLAKDITSDTSGDFRNALLSLAKGDRSEDFGVNEDLADSDARALYEAGERRKGTDVNVFNTILTTRSYPQLRRVFQKYTKYSKHDMNKVLDLELKGDIEKCLTAIVKCATSKPAFFAEKLHQAMKGVGTRHKALIRIMVSRSEIDMNDIKAFYQKMYGISLCQAILDETKGDYEKILVALCGGN

SEQ ID NO: 247 - DNA, 3080 bp, Homo sapiens
cactggcttcaggagctgaataccctcccaggcacacacaggtgggacacaaataagggttttggaaccactattttctcatcacgacagcaacttaaaatgcctgggaagatggtcgtgatccttggagcctcaaatatactttggataatgtttgcagcttctcaagcttttaaaatcgagaccaccccagaatctagatatcttgctcagattggtgactccgtctcattgacttgcagcaccacaggctgtgagtccccatttttctcttggagaacccagatagatagtccactgaatgggaaggtgacgaatgaggggaccacatctacgctgacaatgaatcctgttagttttgggaacgaacactcttacctgtgcacagcaacttgtgaatctaggaaattggaaaaaggaatccaggtggagatctactcttttcctaaggatccagagattcatttgagtggccctctggaggctgggaagccgatcacagtcaagtgttcagttgctgatgtatacccatttgacaggctggagatagacttactgaaaggagatcatctcatgaagagtcaggaatttctggaggatgcagacaggaagtccctggaaaccaagagtttggaagtaacctttactcctgtcattgaggatattggaaaagttcttgtttgccgagctaaattacacattgatgaaatggattctgtgcccacagtaaggcaggctgtaaaagaattgcaagtctacatatcacccaagaatacagttatttctgtgaatccatccacaaagctgcaagaaggtggctctgtgaccatgacctgttccagcgagggtctaccagctccagagattttctggagtaagaaattagataatgggaatctacagcacctttctggaaatgcaactctcaccttaattgctatgaggatggaagattctggaatttatgtgtgtgaaggagttaatttgattgggaaaaacagaaaagaggtggaattaattgttcaagagaaaccatttactgttgagatctcccctggaccccggattgctgctcagattggagactcagtcatgttgacatgtagtgtcatgggctgtgaatccccatctttctcctggagaacccagatagacagccctctgagcgggaaggtgaggagtgaggggaccaattccacgctgaccctgagccctgtgagttttgagaacgaacactcttatctgtgcacagtgacttgtggacataagaaactggaaaagggaatccaggtggagctctactcattccctagagatccagaaatcgagatgagtggtggcctcgtgaatgggagctctgtcactgtaagctgcaaggttcctagcgtgtacccccttgaccggctggagattgaattacttaagggggagactattctggagaatatagagtttttggaggatacggatatgaaatctctagagaacaaaagtttggaaatgaccttcatccctaccattgaagatactggaaaagctcttgtttgtcaggctaagttacatattgatgacatggaattcgaacccaaacaaaggcagagtacgcaaacactttatgtcaatgttgcccccagagatacaaccgtcttggtcagcccttcctccatcctggaggaaggcagttctgtgaatatgacatgcttgagccagggctttcctgctccgaaaatcctgtggagcaggcagctccctaacggggagctacagcctctttctgagaatgcaactctcaccttaatttctacaaaaatggaagattctggggtttatttatgtgaaggaattaaccaggctggaagaagcagaaaggaagtggaattaattatccaagttactccaaaagacataaaacttacagcttttccttctgagagtgtcaaagaaggagacactgtcatcatctcttgtacatgtggaaatgttccagaaacatggataatcctgaagaaaaaagcggagacaggagacacagtactaaaatctatagatggcgcctataccatccgaaaggcccagttgaaggatgcgggagtatatgaatgtgaatctaaaaacaaagttggctcacaattaagaagtttaacacttgatgttcaaggaagagaaaacaacaaagactatttttctcctgagcttctcgtgctctattttgcatcctccttaataatacctgccattggaatgataatttactttgcaagaaaagccaacatgaaggggtcatatagtcttgtagaagcacagaaatcaaaagtgtagctaatgcttgatatgttcaactggagacactatttatctgtgcaaatccttgatactgctcatcattccttgagaaaaacaatgagctgagaggcagacttccctgaatgtattgaacttggaaagaaatgcccatctatgtcccttgctgtgagcaagaagtcaaagtaaaacttgctgcctgaagaacagtaactgccatcaagatgagagaactggaggagttccttgatctgtatatacaataacataatttgtacatatgtaaaataaaattatgccatagcaagattgcttaaaatagcaacactctatatttagattgttaaaataactagtgttgcttggactattataatttaatgcatgttaggaaaatttcacattaatatttgctgacagctgacctttgtcatctttcttctattttattccctttcacaaaattttattcctatatagtttattgacaataatttcaggttttgtaaagatgccgggttttatatttttatagacaaataataagcaaagggagcactgggttgactttcaggtactaaatacctcaacctatggtataatggttgactgggtttctctgtatagtactggcatggtacggagatgtttcacgaagtttgttcatcagactcctgtgcaactttcccaatgtggcctaaaaatgcaacttctttttattttcttttgtaaatgtttaggtttttttgtatagtaaagtgataatttctggaattaaa

SEQ ID NO: 248 - protein, 739 aa, Homo sapiens
MPGKMVVILGASNILWIMFAASQAFKIETTPESRYLAQIGDSVSLTCSTTGCESPFFSWRTQIDSPLNGKVTNEGTTSTLTMNPVSFGNEHSYLCTATCESRKLEKGIQVEIYSFPKDPEIHLSGPLEAGKPITVKCSVADVYPFDRLEIDLLKGDHLMKSQEFLEDADRKSLETKSLEVTFTPVIEDIGKVLVCRAKLHIDEMDSVPTVRQAVKELQVYISPKNTVISVNPSTKLQEGGSVTMTCSSEGLPAPEIFWSKKLDNGNLQHLSGNATLTLIAMRMEDSGIYVCEGVNLIGKNRKEVELIVQEKPFTVEISPGPRIAAQIGDSVMLTCSVMGCESPSFSWRTQIDSPLSGKVRSEGTNSTLTLSPVSFENEHSYLCTVTCGHKKLEKGIQVELYSFPRDPEIEMSGGLVNGSSVTVSCKVPSVYPLDRLEIELLKGETILENIEFLEDTDMKSLENKSLEMTFIPTIEDTGKALVCQAKLHIDDMEFEPKQRQSTQTLYVNVAPRDTTVLVSPSSILEEGSSVNMTCLSQGFPAPKILWSRQLPNGELQPLSENATLTLISTKMEDSGVYLCEGINQAGRSRKEVELIIQVTPKDIKLTAFPSESVKEGDTVIISCTCGNVPETWIILKKKAETGDTVLKSIDGAYTIRKAQLKDAGVYECESKNKVGSQLRSLTLDVQGRENNKDYFSPELLVLYFASSLIIPAIGMIIYFARKANMKGSYSLVEAQKSKV

SEQ ID NO: 249 - DNA, 1152 bp, Homo sapiens
atgaccgcgaccgaagccctcctgcgcgtcctcttgctcctgctggctttcggccacagcacctatggggctgaatgcttcccggcctgcaacccccaaaatggattctgcgaggatgacaatgtttgcaggtgccatgtcggctggcagggtcccctttgtgaccagtgcgtgacctctcccggctgccttcacggactctgtggagaacccgggcagtgcatttgcaccgacggctgggacggggagctctgtgatagagatgttcgggcctgctcctcggccccctgtgccaacaacgggacctgcgtgagcctggacggtggcctctatgaatgctcctgtgcccccgggtactcgggaaaggactgccagaaaaaggacgggccctgtgtgatcaacggctccccctgccagcacggaggcacctgcgtggatgatgagggccgggcctcccatgcctcctgcctgtgcccccctggcttctcaggcaatttctgcgagatcgtggccaacagctgcacccccaacccatgcgagaacgacggcgtctgcactgacattgggggcgacttccgctgccggtgcccagccggcttcatcgacaagacctgcagccgcccggtgaccaactgcgccagcagcccgtgccagaacgggggcacctgcctgcagcacacccaggtgagctacgagtgtctgtgcaagcccgagttcacaggtctcacctgtgtcaagaagcgcgcgctgagcccccagcaggtcacccgtctgcccagcggctatgggctggcctaccgcctgacccctggggtgcacgagctgccggtgcagcagccggagcaccgcatcctgaaggtgtccatgaaagagctcaacaagaaaacccctctcctcaccgagggccaggccatctgcttcaccatcctgggcgtgctcaccagcctggtggtgctgggcactgtgggtatcgtcttcctcaacaagtgcgagacctgggtgtccaacctgcgctacaaccacatgctgcggaagaagaagaacctgctgcttcagtacaacagcggggaggacctggccgtcaacatcatcttccccgagaagatcgacatgaccaccttcagcaaggaggccggcgacgaggagatctaa

SEQ ID NO: 250 - protein, 383 aa, Homo sapiens
MTATEALLRVLLLLLAFGHSTYGAECFPACNPQNGFCEDDNVCRCHVGWQGPLCDQCVTSPGCLHGLCGEPGQCICTDGWDGELCDRDVRACSSAPCANNGTCVSLDGGLYECSCAPGYSGKDCQKKDGPCVINGSPCQHGGTCVDDEGRASHASCLCPPGFSGNFCEIVANSCTPNPCENDGVCTDIGGDFRCRCPAGFIDKTCSRPVTNCASSPCQNGGTCLQHTQVSYECLCKPEFTGLTCVKKRALSPQQVTRLPSGYGLAYRLTPGVHELPVQQPEHRILKVSMKELNKKTPLLTEGQAICFTILGVLTSLVVLGTVGIVFLNKCETWVSNLRYNHMLRKKKNLLLQYNSGEDLAVNIIFPEKIDMTTFSKEAGDEEI

SEQ ID NO: 251 - DNA, 4377 bp, Homo sapiens
  misc_feature (1133)..(1133): n is a, c, g, or t
  misc_feature (3928)..(3928): n is a, c, g, or t
  misc_feature (4128)..(4128): n is a, c, g, or t
  misc_feature (4161)..(4162): n is a, c, g, or t
  misc_feature (4250)..(4250): n is a, c, g, or t
  misc_feature (4280)..(4280): n is a, c, g, or t
  misc_feature (4287)..(4287): n is a, c, g, or t
  misc_feature (4309)..(4309): n is a, c, g, or t
  misc_feature (4318)..(4318): n is a, c, g, or t
  misc_feature (4347)..(4347): n is a, c, g, or t
  misc_feature (4349)..(4349): n is a, c, g, or t
gagctcccctcccctctccagcacgcgagtgtcggtaggtactacggcggagggcacctcctgggcccgcctccctaaccagggccccgcttgcgcgctgcctgctgtcttcacgtgatgcgcacccgagcttcgccgccaggcggcgctgatcatcggggagggggttaggggtcctagacacgcgagtcttcgctgtttctcattcattcattcattcacttaaatgttatttttcccttccttccttccctccctccttccgggatggggtcttgctgtgctgctcaggttggtctcaaactcccgggctcaagtgagcctcctgcctcagtttcccaaagtgctggggttacaggcatgagtcacggtacccggattctctctttctctctctgaatatatataatatatataaaatatatatataaaaatatataatatatataaaatatataaaaaatatatataaaatatatataatatataaaatatatataatatataatatatataaaatatatattatatagtatatataaatatatatactatataatatatataaatatatataatatataatatataaaatatatataatatataatatataaaatatatataatatataatatacataaaatatatataatatataatatatataaaaatataaaatatataatatatataaaaaatataaaatatataatatatataaaatataaaatatatattatatataatatataaaatatataaaatatataaaatgtatgatatataaaatatatataatatataaaatatataatatataatatataatatataawatatataatatataatatataawatatataatatataatatatataatatataatatattatatatataaatatatataatacatatatattatatatattatatataatatataaatatatatataaatataatatatatatatttatatataatatataaaatatatattttatatattatatataaaaatatataatatataaatatataaataaataaaatatatataaaataaaatatataaaatatatatataaaaaatatatatatattttagtttctaagacaggntcttgctgtgtcgcccaggctggagtgcagtggcaaaatcataggttactgcagcctcgacctcctgggctcaaacaatcctcccgcctcagcctccgagatagctgggtccacaggcgaataccctgcccacctactttttttttttttttttttttttaattgtagagaccgggtcaggctggtctcaaactccttgcctcaggggatcacaggcgcgttatagagacgggggctttccctgtgtttcccaggctggtctagaactcctggtcttaggcagccctcccgcctgggcccctcaaagtactggaatttgcaggcgtaagccaccgcatctggctttgcacatttatcttccagcaaagaaaaacctgggcaactacatccaggaacttaattgctttaatttgggaggaagcaggagattgaggggtaaaggtgcaagaagagagaaaagaaaaattaggctgtttggaaagggtagcacagatatgatgtaagaaattgggtttcaccatatttgtgtgtgtgtgtgtgtgtgcgtcctcctctctcctgccctcactaggcgtgcctgtttgaaggccccgcgcgtttccggctcctgctcagaagctgtccaccttgattctgcccgtagcaggtgaacctggtgtggtgcgcgcactgcgggtcctgattggctgtgcacgccacggtgaaaaacttgagcgtctactccgagtcctgcaagctcctagtgtctcctctgggtggacgcctaggcgcacggccgttacttctctttcacctgtggattcgtcagtttctcgttcgtttcaggaggcgatcccgcgccctgggtgcggtgaggccgctgggacagcggaggtgcctcccgacgcgaagcagcgagctgaggcggcggccagcggggaagatgagcggcagcagcgccaggtccagccacctgtctcagcccgtcgtgaagagcgtgcttgtgtaccgcaacggggaccccttctacgcggggcgccgcgtcgtcatccatgagaagaaggtgtccagcttcgaagtcttcctgaaggaggtgaccggcggcgttcaggcaccctttggggccgtcaggaacatctacaccccgcggactggccaccgaatccggaagctagaccagatccagagcgggggcaattacgtggctggaggccaggaagccttcaagaaactcaagtgagtcggtctcccccaccgcccacccatttaggtgccctatagtgtggggttgatatgaagaaatgcagatccctacccccccacacctcagtggttgaggggctgtgacttctcggtgtgattgatgcccctcaaaactctcgttgcagttggggggtagaggttgacactgtgactggagaaggaatttcacttgggtcagcagtaggagtaaacttaaaatctgtgtataaacaacaggaatcttaaagaaaataaaaaggtatccttgcaaaggttagtgaccaaactgatacttttgcgttttctgttcagttttttctttccttttccttattttttttccttggaaatccatccttttaatttaaataaacattcttaaaaatcacttccaagtgttggacactatattgtcaccagaggagaaaattgctctgcatttcccgtactgtttaaattatttcaacctttcattccaagtagaattgacaacactcacttttgtgaccctgctcccaccccctgcatgtttatgctgttagcataatgcaggaagagtttactggctgactgtatttgtcgactgtctgtctccagcaacgtgattagaccttcaagggcaggggtccttattcccagctcttgagctcactcatagtgagtgttcagtgaattaagaaaccgtcagttcagggaacaaagatgagcaaggcatgattccttgtctttaggagctttcagtctaactggactacctgcacactaacaattttaatgcaagctacaaagggatatgtgcaattagaaaaataaagttatgtgggaattgtgagttgagagttggttggggtggtcattataggacaggtagaattttacattccattttttttttacagctttattgagatagatttctcatggcatgaagtccaaccatttcattggctttcagtgtattcagagttgtgcaaccatcaccaccaactaattgtagttcatttccacccctcccgccaaaacatttgtacctcccagtttcctctgtcccctgtcatctggaaaccactaatctattttctgaatctatggatttgtctattctggacatatcatataaatggaatcatacggtatatggtctttatgtctggcttatttcacttactgtaacattttcaaggttcatccatgttgtatcatacatcaatacttcattctttttattgttgaataacattccatgatttgggtatattaccttttatatccatgcttatccatttatcagtttgatgtatatttgggtatgtttcacattttaactattatgaataatgcatctatgaatatttgtgtacaagttttcatttctctttggtgtatacctaagagtgaaattgctggatcacatggtaactctgtattccatagtttaatagaacattttaattgaaattcatcttgggccccaggatagaaaaaagccttgaccataaatctaagcttatgaattcataagcattattggattcttaataattaaaattcaaataaagtcttatwactacatnagaaatatttttcaaaatatcactaaaattcttgaatgtaatccttcttctcctatatttgtttaaattgagttctaggtattctattatactttttgttacgtcagacattcttttcatggaaagtgagggatatatttggatttatttttccctcccctgaagcttcttaagcatgctttgttaaacttcgtaaaaangggctaaatgaaattgcatgcttaaaggaaacnnaaaaccaggagactgaagactgagttgctcatcagctctgtgtccttgggcaagtcgcttgactcagctaatcagtttcttaatacanaaaaggtgcataatcatttgtaccacacanggcttgngataaacagtaaatggctatanatgtgtgtntttgtaaacaccaaagtgttacataaatntnaagacacctctatggaccagttcctttc

SEQ ID NO: 252 - protein, 84 aa, Homo sapiens
MDDDAAPRVEGVPVAVHKHALHDGLRQVAGPGAAAAHLPRWPPPQLAASRREAPPLSQRPHRTQGAGSPPETNEKLTNPQVKEK

SEQ ID NO: 253 - protein, 253 aa, Homo sapiens
MANLGCWMLVLFVATWSDLGLCKKRPKPGGWNTGGSRYPGQGSPGGNRYPPQGGGGWGQPHGGGWGQPHGGGWGQPHGGGWGQPHGGGWGQGGGTHSQWNKPSKPKTNMKHMAGAAAAGAVVGGLGGYMLGSAMSRPIIHFGSDYEDRYYRENMHRYPNQVYYRPMDEYSNQNNFVHDCVNITIKQHTVTTTTKGENFTETDVKMMERVVEQMCITQYERESQAYYQRGSSMVLFSSPPVILLISFLIFLIVG

SEQ ID NO: 254 - protein, 286 aa, Human herpesvirus
MPRMKDIPTKSSPGTDNSEKDEAVIEEDLSLNGQPFFTDNTDGGENEVSWTSSLLSTYVGCQPPAIPVCETVIDLTAPSQSGAPGDEHLPCSLNAETKFHIPDPSWTLSHTPPRGPHISQQLPTRRSKRRLHRKFEEERLCTKAKQGAGRPVPASVVKVGNITPHYGEELTRGDAVPAAPITPPYPRVQRPAQPTHVLFSPVFVSLKAEVCDQSHSPTRKQGRYGRVSSKAYTRQLQQALEEKDAQLCFLAARLEAHKEQIIFLRDMLMRMCQQPASPTDAPLPPC

SEQ ID NO: 255 - protein, 91 aa, Human adenovirus
MVPRNFFFTILICAFNVCATFTAVATATPDCIGAFASYALFAFVTCICVCSIVCLVINFFQLLDWILVRIAYLRHHPEYRNQNIAALLRLI

SEQ ID NO: 256 - protein, 420 aa, Epstein-Barr virus
MVDEQVAVEHGTVSHTISREEDGVVHERRVLASGERVEVFYKAPAPRPREGRASTFHDFTVPAAAAVPGPEPEPEPHPPMPIHANGGGETKTNTQDQNQNQTTRTRTNAKAEERTAEMDDTMASSGGQRGAPISADLLSLSSLTGRMAAMAPSWMKSEVCGERMRFKEDVYDGEAETLAEPPRCFMLSFVFIYYCCYLAFLALLAFGFNPLFLPSFMPVGAKVLRGKGRDFGVPLSYGCPTNPFCKVYTLIPAVVINNVTYYPNNTDSHGGHGGFEAAALHVAALFESGCPNLQAVTNRNRTFNVTRASGRVERRLVQDMQRVLASAVVVMHHHCHYETYYVFDGVGPEFGTIPTPCFKDVLAFRPSLVTNCTAPLKTSVKGPNWSGAAGGMKRKQCRVDRLTDRSFPAYLEEVMYVMVQ

SEQ ID NO: 257 - protein, 78 aa, Human papillomavirus
YVVLLYLAPVKYPFLKLLTHCTPQPPTPPPPAPTLTPVCHHGNGKDSVTRTRGPWSVCITYIPPQSPVPSVLHIMLRQ

SEQ ID NO: 258 - protein, 100 aa, Human papillomavirus
MIGKQATLRDIVLEELVQPIDLHCHEELPDLPEDIEASVVEEEPAYTPYKIIVLCGGCEVRLKLYVWATDAGIRNLQDCLLGDVRLLCPTCREDIRNGGR

SEQ ID NO: 259 - protein, 1165 aa, Molluscum contagiosum
MKNYRVHKMDQKLGFKFLEPDPKKNVFYRPLHFQYESYANFILYRLREILAVRRTLLSFKNDTERIVLEIDKIKVTPPEYSPIIASIKGKGYDALVTFTINIYKEVMTKEGVTLTKISSYEGNDSQLIKIPLLIAYGNKNPLDPAKFVSPNIIGGVFINKQSIEKVGINIVEKITTWPKFKVVKPNAFTFSFSSVSPVNVLPTKYRHYKITLDLAQLEHCTISSSKTFITVNVLLLVQFLANVGLDFIRNSLAYDMPPEAVYLVNALVESTRRLAAAEDDFDVAEYVAELIEAEHAKQRSPAKLEDFRYDMLQNFLPHMLHSGNQLKGLYLLSLLRKFLFCTFFPSRYPDRDSMICHRILTYGKYFETLANDELENYINNIKTDLFNNHKNRGTCTVNIHVLTTPGFNHAFSGLLSGKFKKTDGSYRTHPHYSWMQNISIPRSVGYYPDQVKISKMFSVRKYHPSQYVYFCPSDVPERGPQVGLVSQLSVLSYVTNIRTDEYLALEQRIREYVYSYPQVNISFFETGFPLTIENALVAVLNPHLVDDFVADFKTRKRLNFFENMELGITLVKDHMNEVRVNIGSGRLVRPFLVVHQGVLVMDTVGAELDARMETMTFSDIQREYPHVLELVDVEQFTFSNVCESAARFRALPEAERRLYDYVDFPAEFRDGYVASTLVGVNHNSGPRAILGCAQAKQAISCLSSDLRNKIDNGIHLLFPERPIVLSKAVETSKIAVNCFGQHVLIALMSYKGINQEDGIILKREFVQRGGLDIVTAKKHQVEIPLENFNNKERVKSTAYSKLDSNGLVKLNAFLEPGDAVARNISSRTLEDEFVDDNQISFDIAERYTDMYPSRVERVQVDLTDKVKVRVLTIKERRPVLGDKFTSRTSQKGTVAYLADEAELPYDDDGLTPDIIVNSTSIYSRKTISMLVEIMLTAAYAAKPYNNQDQNRPICFPSSNETSIETYLAFARKCYESVFPELRETELQARLFCEKTLYDPETDEPYAAAVFMGPIYYLRLRHLTQDKATVRCRGKKTKLIRQANEGRKRGGGIKFGEMERDCLIAHGAANTITEILKDSEEDSQDVHVCEHCGDIATRKNNVLFCIRCTKLNLSPVLTRVDTTHVSKVFLTQMNARGVKVRLEFEKQEPLFYSPLKPVDLRPRVLG

SEQ ID NO: 260 - protein, 610 aa, Human herpesvirus
MITHAMEGSKTFNIPTFVLDENCNFIPDVLSRANAKFIKEVLIRDSYNAVCLANSFIPMATQTVEQILIIITKFKFSRSRDLLMSVFRLGVHINRFYAGKNQVKHMITMMKSLFDTEEAMRQLDRALMGLFVDARDNSYMPLIALSLHENGLPDSKFIKAVRLIQTTVNSFHNRPDADIEQYAEKLRAYNYLYKIPKYSLKEAVDIYSDNLKDLTIGVNKKPTLLFTSSDDAYLSHIYNDLLFLTSTWNMIYNCKKEIRRLNTWIKYEINSIMETAVLVGFQLPDLKETILDLAALISNMNLVSPDKELFPHYKLILAKLFEICIFATKANICILPSFIKGHLIEFEDVLKRSNDDEDLNYLLLKSRDSDDEYDEDKPPIQVDPGRVDNVLTDSDFFNVTPENAFSSIAIMPISYDKTIDVEDNEIQVLEVEMQSLSAVVYGAVASKYGLSLEQVIRKLNRNEGRTSSRASPSHSTSTVPYSPPQSDRSTPTSILRQRVPMRSNSRSSSVSFSQEDSNRSHYSDETNISDYSYPMADLELEDEEPMEDHPHSPQSTSSNNSMSRQSRALQNGQRRRAPTMVPSSQTRRQNNARPRRVARRLTEMMNDARL

SEQ ID NO: 261 - protein, 149 aa, Human papillomavirus
MFQDTEEKPRTLHDLCQALETTIHNIELQCVECKKPLQRSEVYDFAFADLTVVYREGNPFGICKLCLRFLSKISEYRHYNYSVYGNTLEQTVKKPLNEILIRCIICQRPLCPQEKKRHVDLNKRFHNISGRWAGRCAACWRSRRRETAL

SEQ ID NO: 262 - protein, 177 aa, Vaccinia virus
MNGGHIQLIIGPMFSGKSTELIRRVRRYQIAQYKCVTIKYSNDNRYGTGLWTHDKNNFEALEATKLCDVLESITDFSVIGIDEGQFFPDIVEFCERMANEGKIVIVAALDGTFQRKPFNNILNLIPLSEMVVKLTAVCMKCFKEASFSKRLGEETEIEIIGGNDMYQSVCRKCYIDS

SEQ ID NO: 263 - protein, 483 aa, Human adenovirus
MESRNPFQQGLPAGFLSSSFVENMEVPAPECNLRLLAGTAARHSEDPESPAAGGSRRESESRPGPSGGGVADLFPELHRVLTRSSSGRERGIKRERHDETNHRIELTVGLMSRKRPETVWWYEVQSTGTDEVSVMHERFSLEQVKTCWLEPEDDWEVAIRNYAKLALRPDRKYKITKLINIRNACYISGNGAEVEICLQDRVAFRCCMMNMYPGVVDMDGVTFMNMRFRGDGYNGTVFMANTKLTVHGCSFFGFNNTCIEAWGQVGVKGCSFSANWMGVVGRTKSMLSVKKCLFERCHLGVMSEGEARIRHCASTETGCFVLCKGNAKIKHNMICGASDERGYQMLTCAGGNSHMLAAVHVASHSRKPWPEFEHNVMTRCNMHLGARRGMFMPYQCNLNYVKVLLEPDVMSRVSLTGVFDMNVEVWKILRYDEYKTRCRACECGGKHARFQPVCVDVTEDLRPDHLVLSCTGTEFGSSGEESD

SEQ ID NO: 264 - protein, 420 aa, Epstein-Barr virus
MVDEQVAVEHGTVSHTISREEDGVVHERRVLASGERVEVFYKAPAPRPREGRASTFHDFTVPAAAAVPGPEPEPEPHPAMPIHANGGGETKTNTQDQNQNQTTRARTNAKAEERTAEMDDTMASSGGQRGAPISADLLSLSSLTGRMAAMAPSWMKSEVCGERMRFKEDVYDGEAETLAEPPRCFMLSFVFIYYCCYLAFLALLAFGFNPLFLPSFMPVGAKVLRGKGRDFGVPLSYGCPTNPFCKVYTLIPAVVINNVTYYPNNTDSLGGHGGFEAAALHVAALFESGCPNLQAVTNRNRTFNVTRASGRVERRLVQDMQRVLASAVVVMHHHCHYETYYVFDGVGPEFGTIPTPSFKDVLAFRPSLVTNCTAPLKTSVKGPNWSGAAGGMKRKQCRVDRLTDRSFPAYLEEVMYVMVQ

SEQ ID NO: 265 - protein, 74 aa, Human papillomavirus
MILCIFVFLFCVGFCLCLCVSLAVSVYIYPWLLVLIIITFIHVSQSLLKVFFLYVLVFYIPMALVHYHATLQIT

SEQ ID NO: 266 - protein, 81 aa, Human parvovirus
MDSYLTTPMPYHPVAVMQNLEEKMQYYLVKTYTSLGKLAYNYPVLTMLGLAMSYKLGPRKVLLTVLQGFMTLGIANWLSWE

SEQ ID NO: 267 - protein, 216 aa, Molluscum contagiosum
MREQVWPRPGPAFSATRHSETVRPLVRLDCFLYFCAGSYARGRESSTCLRSAPRTTRHEFPSEGPPPPMMTIVSVLGTRDLRPCSHPGPVSFRCPGRYNTSTFDAVGRFVAAQSGSLYAKGTQLDGKQRSMTYHCFTQALFGTCLWRAPAGYGDKSAWLSSCFPPRTQRILVCHRESFACESTATLALGVKPLVNVVRRSVVESPSCQVPMKTVIA

SEQ ID NO: 268 - protein, 874 aa, Epstein-Barr virus
MSAPVVIKALVASNTDIAEAILDAILSRPDEGFRLFCLCHNASPLHHVAGSLVELQLHLPKKRLTSQSRCGLVLTLHLPAEEAFPFLRGLTPLTADRLSTYLDRAGALRSLTPLVELLTLSAKKQPQGDARGRVAWLRPKIVGCLRRIYRVNISARWFISTFGSHEAQFVLVTAAYYFWGIPCTIETLAHLTELFTSESGQSLAAVTSLAELGEVFGSSAWAEQTEAFAHFAHEKLRRDSREIRAVARTIDAYRGRLPLASADLVRYVYLAHAQCFNEGTFKRYSQLTSMGEIGCLPSGGVVLPSLLDRGFAEHMRTYFTRETYLAEHVRVQQLKIRMEPPAPYTWDPDPDDGLMRAWAGLSVDVARELVELARWHADEGPTYPPTLQGFLCLAGQATCRGQWNPKEQFLPPTVLRRVQRLPVFLCHFADRHYFVMTAADPFSSHLAEVVSTPTNCRLPDTCLTRALSYTPVYYSQNSLSEQLFVSRHEYFNPRLPVCNLVLDLDLKIKGAPWSLEEIYDLCRTVRREVLRLMRRLGPVSRAHPVYFFKSACPPADPDNMEDVLPFCICTGKLGFRVITPLPRGHAIVGTSAVQGFVSVLQKLMGLTACLRRMRHKIKEIGAPLFDSGVYHAGRCIRLPHTYKVDRGGGLSRQLRLFVCHPEEEDKHSYVKNALNIQNLLHHSLHVGWPAPKTFCYHIADDGRDYLIQRTRETLPPTVENVCAMIEGHLGLDLVAWVSSCIWPSLMSTLATAVPEDKFPQFLHVTFEQTGPNLVQVCHARGRNFACLRHTHRASSKNVRVFLVLYYTSQAITVTFMSQCFAGRCGANQPTAHFSISVPASRIINRAEASQDSTTSQLARRRDRQDGSFSETLPN

SEQ ID NO: 269 - protein, 90 aa, Human papillomavirus
MADDSALYEKYPLLNLLHTPPHRPPPLQCPPAPRKTACRRRLGSEHVDRPLTTPCVWPTSDPWTVQSTTSSLTITTSTKEGTTVTVQLRL

SEQ ID NO: 270 - protein, 177 aa, Variola virus
MNGGHIQLIIGPMFSGKSTELIRRVRRYQIAQYKCVTIKYSNDNRYGTGLWTHDKNNFEALEATKLCDVLEAITDFSVIGIDEGQFFPDIVEFCERMANEGKIVIVAALDGTFQRKPFNNILDLIPLSEMVVKLTAVCMKCFKEASFSKRLGTETKIEIIGGIDMYQSVCRKCYIDS

SEQ ID NO: 271 - protein, 204 aa, Human adenovirus
MGSSEQELKAIVKDLGCGPYFLGTYDKRFPGFVSPHKLACAIVNTAGRETGGVHWMAFAWNPRSKTCYLFEPFGFSDQRLKQVYQFEYESLLRRSAIASSPDRCITLEKSTQSVQGPNSAACGLFCCMFLHAFANWPQTPMDHNPTMNLITGVPNSMLNSPQVQPTLRRNQEQLYSFLERHSPYFRSHSAQIRSATSFCHLKNM

SEQ ID NO: 272 - protein, 300 aa, Human spumaretrovirus
MDSYEKEESVASTSGIQDLQTLSELVGPENAGEGELTIAEEPEENPRRPRRYTKREVKCVSYHAYKEIEDKHPQHIKLQDWIPTPEEMSKSLCKRLILCGLYSAEKASEILRMPFTVSWEQSDTDPDCFIVSYTCIFCDAVIHDPMPIRWDPEVGIWVKYKPLRGIVGSAVFIMHKHQRNCSLVKPSTSCSEGPKPRPRHDPVLRCDMFEKHHKPRQKRPRRRSIDNESCASSSDTMANEPGSLCTNPLWNPGPLLSGLLEESSNLPNLEVHMSGGPFWEEVYGDSILGPPSGSGEHSVL

SEQ ID NO: 273 - protein, 650 aa, Human papillomavirus
MADSGNWEGRCTGWFNVEAIVERKTGDPIPEDENYDGGDTDESEMGDFIDNAHIPNIYAQQEIAQALYQSQQANADNEAIRVLKRKFTGSPGGSPDMKRDEFIDKQLSPQINVLSISSGRSTSKRRLFEEQDSGYGNTEVETYETEVPGLGAGVGCLQNVNEEGNQIVSPRESSSGSSSISNMDIETESTPITDITNLLQSNNAKAALLAKFKEVYGLSYMELVRPYKSDKTHCQDWVCAVFGVIPSLAESLKSLLTQYCMYIHLQCLTCTWGIIVLVLVRFKCNKNRLTVQKLLSSLLNVTQERMLIEPPRLRSTPCALYWYRTSLSNISEIVGDTPEWIKRQTLVQHSLDDSQFDLSQMIQWAFDNDITDDCEIAYKYALLGNVDSNAAAFLKSNAQAKYVKDCGTMCRHYKAAERKQMSMAQWIQHRCDLTNDGGNWKDIVLFLRYQNVEFMPFLITLKQFLKGIPKQNCIVLYGPPDTGKSHFGMSLIKFIQGVVISYVNSTSHFWLSPLADAKMALLDDATPGCWTYIDKYLRNALDGNPICLDRKHKNLLQVKCPPLLITSNTNPKADDTWKYLHSRIKVFTFLNPFPFDSNGNPLYQLTNENWKAFFTKTWSKLDLTEDDDKENDGDTVQTFKCVSGRNPRTV

SEQ ID NO: 274 - protein, 154 aa, Hepatitis B virus
MAARLCCQLDPARDVLCLRPVGAESRGRPLPGPLGAIPPASPSTVPTDHGAHLSLRGLPVCAFSSAGPCALRFTSARRMETTVNAHRNLPKVLHKRTLGLSVMSTTDLEAYFKDCVFTEWEELGEEMRLKVFVLGGCRHKLVCSPAPCNFFTSA

SEQ ID NO: 275 - protein, 686 aa, Cercopithecine herpesvirus
MSSRRRRVSMGPPRAPDDGADAEAMDYDSDGGAGGTGIVGYLRSVFGGGDSDGAGAPRETEADEPPSRRRRESRDPPRGRRASAAPDARRPRRASGAPRPDRRASGRPSPARPRGYLGAVDTAALVADLAGAPRFLPSDLFLAELTFDEGDYPGVAGTGDPRARPPAKIEILEGRLPREDALALLPIDQMGPRISAWDESVHSALAMGNPACLYPCPHGAFNLAPVGDMHMGGPDDPAVFYRRTLRQGQELAWHLTGDALRELTDRQLRTTPYHAVNFLADAVVRVAANARLCGERLHAEVGSARADARASELRRQFARLTALRPVEAGAAPLLAAAGPLAPQTGPEAAAFRSSLGSLAYWAELRAMLDRECRVAVRHAARLTYVATGALLARVHPEAIRCLAPREAAFLGRVFDVLAVLAEQAVQWLSVAVGARLHPRSAHPAFRDALFAELFRALPLGSPAVVSAENEVFGPEAGHRTIGDCALGLVLCSAVYALHTALATVALRHARASAGPDAEARPGAARAAVRAILAGALVLQRTLGFADAVLACLSAAAFDGGLAAPDVGAYTPLRYACALRAAAPLYARTTPSQFWADVRAASRRIDLRPVASRPPAAGAGTVAPRFLLEQFEHFPPEPLEGGASVLGPRARVADIRSQFRRLLMGDEEAAALRAHVSGRRAAGLAAR

SEQ ID NO: 276 - protein, 946 aa, Human cytomegalovirus
MTLVLFATEYDSAHIVANVLSQTPTDHCVFPLLVKHQVSRRVYFCLQTQKCSDSRRVAPVFAVNNETLQLSRYLAARQPIPLSALIASLDEAETRPLYRHLFRTPVLSPEHGGEVREFKHLVYFHHAAVLRHLNQVFLCPTSPSWFISVFGHTEGQVLLTMAYYLFEGQYSTISTVEEYVRSFCTRDLGTIIPTHASMGEFARLLLGSPFRQRVSAFVAYAVARNRRDYTELEQVDTQINAFRERARLPDTVCVHYVYLAYRTALARARLLEYRRVVAYDADAAPEAQCTREPGFLGRRLSTELLDVMQKYFSLDNFLHDYVETHLLRLDESPHSATSPHGLGLAGYGGRIDGTHLAGFFGTSTQLARQLERINTLSESVFSPLERSLSGLLRLCASLRTAQTYTTGTLTRYSQRRYLLPEPALAPLLERPLPVYRVHLPNDQHVFCAVASETWHRSLFPRDLLRHVPDSRFSDEALTETVWLHDDDVASTSPETQFYYTRHEVFNERLPVFNFVADFDLRLRDGVSGLARHTVFELCRGLRRVWMTVWASLFGYTHPDRHPVYFFKSACPPNSVPVDAAGAPFDDDDYLDYRDERDTEEDEDGKEDKNNVPGNGVFQKTTSSVDTSPPYCRCKGKLGLRIITPFPACTIAVHPSVLRAVAQVLNHAVCLDAELHTLLDPISHPESSLDTGIYHHGRSVRLPYMYKMDQDDGYFMHRRLLPLFIVPDAYREHPLGFVRAQLDLRNLLHHHPPHDLPALPLSPPPRVILSVRDKICPSTEANFIETRSLNVTRYRRRGLTEVLAYHLYGGDGATAAAISDTDLQRLVVTRVWPPLLEHLTQHYEPHVSEQFTAPHVLLFQPHGACCVAVKRRDGARTRDFRCLNYTHRNPQETVQVFIDLRTEHSYALWASLWSRCFTKKCHSNAKNVHISIKIRPPDAPMPPATAV

SEQ ID NO: 277 - protein, 99 aa, Human papillomavirus
MADPAAVTKYPLLGLLQSYQQPTTPPHRIPKPAPWAPVKVCGGRRRLLSDQEQSQSTETPTTPTSCCEATPWTVSTVGLSVQLHAQTKQGLSVVLQLHL

SEQ ID NO: 278 - protein, 1129 aa, Human herpesvirus
MAPPGMRLRSGRSTGAPLTRGSCRKRNRSPERCDLGDDLHLQPRRKHVADSVDGRECGPHTLPIPGSPTVFTSGLPAFVSSPTLPVAPIPSPAPATPLPPPALLPPVTTSSSPIPPSHPVSPGTTDTHSPSPALPPTQSPESSQRPPLSSPTGRPDSSTPMRPPPSQQTTPPHSPTTPPPEPPSKSSPDSLAPSTLRSLRKRRLSSPQGPSTLNPICQSPPVSPPRCDFANRSVYPPWATESPIYVGSSSDGDTPPRQPPTSPISIGSSSPSEGSWGDDTAMLVLLAEIAEEASKNEKECSENNQAGEDNGDNEISKESQVDKDDNDNKDDEEEQETDEEDEEDDEEDDEEDDEEDDEEDDEEDDEEDDEEEDEEEDEEEDEEEDEEEEEDEEDDDDEDNEDEEDDEEEDKKEDEEDGGDGNKTLSIQSSQQQQEPQQQEPQQQEPQQQEPQQQEPQQQEPQQQEPQQQEPQQREPQQREPQQREPQQREPQQREPQQREPQQREPQQREPQQREPQQREPQQREPQQREPQQQEPQQQEPQQQEPQQQEPQQQEPQQQEPQQQEPQQQEPQQQEPQQQEPQQQEPQQQEPQQQDEQQQDEQQQDEQQQDEQQQDEQQQDEQQQDEQQQDEQEQQDEQQQDEQQQQDEQEQQEEQEQQEEQQQDEQQQDEQQQDEQQQDEQEQQDEQQQDEQQQQDEQEQQEEQEQQEEQEQQEEQEQQEEQEQELEEQEQELEEQEQELEEQEQELEEQEQELEEQEQELEEQEQELEEQEQELEEQEQELEEQEQELEEQEQELEEQEQELEEQEQELEEQEQELEEQEQEQELEEVEEQEQEQEEQELEEVEEQEQEQEEQEEQELEEVEEQEEQELEEVEEQEEQELEEVEEQEQQGVEQQEQETVEEPIILHGSSSEDEMEVDYPVVSTHEQIASSPPGDNTPDDDPQPGPSREYRYVLRTSPPHRPGVRMRRVPVTHPKKPHPRYQQPPVPYRQIDDCPAKARPQHIFYRRFLGKDGRRDPKCQWKFAVIFWGNDPYGLKKLSQAFQFGGVKAGPVSCLPHPGPDQSPITYCVYVYCQNKDTSKKVQMARLAWEASHPLAGNLQSSIVKFKKPLPLTQPGENQGPGDSPQEMT

SEQ ID NO: 279 - protein, 369 aa, Human adenovirus
MSKRKIKEEMLQVIAPEIYGPPKKEEQDYKPRKLKRVKKKKKDDDDDELDDEVELLHATAPRRRVQWKGRRVRRVLRPGTTVVFTPGERSTRTYKRVYDEVYGDEDLLEQANERLGEFAYGKRHKDMLALPLDEGNPTPSLKPVTLQQVLPALAPSEEKRGLKRESGDLAPTVQLMVPKRQRLEDVLEKMTVEPGLEPEVRVRPIKQVAPGLGVQTVDVQIPTTSSTSIATATEGMETQTSPVASAVADAAVQAAAAAASKTSTEVQTDPWMFRVSAPRRPRRSRKYGAASALLPEYALHPSIAPTPGYRGYTYRPRRRATTRRRTTTGTRRRRRRRQPVLAPISVRRVAREGGRTLVLPTARYHPSIV

SEQ ID NO: 280 - protein, 403 aa, Simian foamy virus
MNDACLLFPASKELDSQNVAVILADDMKHSESILQLGSGAPRKGFPLTSSPLLPMVTPWPFSQDHAAPTLYSLLVAYYKSFQSQKLDPPKWLWQCLGDPSGRKCMVTQFLLPPLGQVRISCYRNLTSIVICQAVDPWENNNEADWRKNPMARPRIKCDHALCFKVVYEGTLWRPHDQKCWLIRLTEGHKYGMEELSPGDWKILQESRPYPYGPIGEDPNLQYAVGVKMKVIGGPLTSTVLALKALSFHRVNICNMDNPSLGEGHAPLRYSHALKAYGPQYGSCEERVWQTATKCIGPEEENYWCEYDHRGFFPMVPNKLSPTWVRHAAPYCIQRFATPYDLQYFANELLPPGFSITTPKGVSYTSDRRLHYGNEGTLQEYNENCDKVKRGYDEISSSDYSDEN

SEQ ID NO: 281 - protein, 350 aa, Human papillomavirus
MMETLCKRLSACQDAILELYERDSVHLSDHIDHWKHVRHENVLLHKAREMGLQTVNNQAVPSLAVSRSKGYNAIEMQIALESLNESLYNTEEWTLQHTSWELWVTEPKQCFKKDGKTVEVRYDCEKDNSMQYVFWTHIYCWYEGGWAKVGSKIDYNGIYYETDDEEKVYYTRFDTDAKRYGVKGIWEVHMGGQVICCAPVSSACEVSIPEIVNPLHTTTTNTTTTCTNVDTGVPSRKRQRQCDPDQRPLECLHNLHPTTESCTQCTTHNVAPIVHLKGDKNSLKCFRYRLHKGYSHLFKNVTTTWHWTNTTNSKCGVITLMFTTVLQQQQFLQHVKIPQTIVVTSGYMSL

SEQ ID NO: 282 - protein, 172 aa, Human adenovirus
MRSDVTKISPRRIIYPLSPAPFNTPCKLNIISPFIKLTSTHSANKGVNHTRNHRFTPYGLGRLQLKSKGCPDSLSKSSIHSTAWRRPPTLTATGLMGHSGTTGCISGGVLEGPESQLSVLLLHSLDTGDVGRLRIAGTNLGRRVGLAGSGSGSGSGSGSDTGPFKKSQYKIL

SEQ ID NO: 283 - protein, 246 aa, Molluscum contagiosum virus
MSFRELILYHLVRYLATENDAFLVQFVSLCRSFSVDVPALLARFSTPRHARLLARALNCKQYTEELALEFPPDALRELLRLKLRRCTPRVRRAARLDARARGAALVAGREVAVRAANEELLTYLVRTYNPALYRYRRAGARSYTGAGAGAGTGDPVEAPGLCAPAGAPVLVVCGRSRIPFFAYAAARVVSNRDLEVVVTDACVQALLREEHAPLLEAVFRRGADTALNRALRSVFRFLRSASERAT

SEQ ID NO: 284 - protein, 1066 aa, Human herpesvirus
MGTEDCDHEGRSVAAPVEVTALYATDGCVITSSLALLTNCLLGAEPLYIFSYDAYRSDAPNGPTGAPTEQERFEGSRALYRDAGGLNGDSFRVTFCLLGTEVGVTHHPKGRTRPMFVCRFERADDVAVLQDALGRGTPLLPAHVTATLDLEATFALHANIIMALTVAIVHNAPARIGSGSTAPLYEPGESMRSVVGRMSLGQRGLTTLFVHHEARVLGAYRRAYYGSAQSPFWFLSKFGPDEKSLVLAARYYLLQAPRLGGAGATYDLQAVKDICATYAIPHDPRPDTLSAASLTSFAAITRFCCTSQYSRGAAAAGFPLYVERRIAADVRETGALEKFIAHDRSCLRVSDREFITYIYLAHFECFSPPRLATHLRAVTTHDPSPAASTEQPSPLGREAVEQFFRHVRAQLNIREYVKQNVTPRETALAGDAAAAYLRARTYAPAALTPAPAYCGVADSSTKMMGRLAEAERLLVPHGWPAFAPTTPGDDAGGGTAAPQTCGIVKRLLKLAATEQQGTTPPAIAALMQDASVQTPLPVYRITMSPTGQAFAAAARDDWARVTRDARPPEATVVADAAAAPEPGALGRRLTRRICARGPALPPGGLAVGGQMYVNRNEIFNAALAVTNIILDLDIALKEPVPFPRLHEALGHFRRGALAAVQLLFPAARVDPDAYPCYFFKSACRPRAPPVCAGDGPSAGGDDGDGDWFPDAGGPGDEEWEEDTDPMDTTHGPLPDDEAAYLDLLHEQIPAATPSEPDSVVCSCADKIGLRVCLPVPAPYVVHGSLTMRGVARVIQQAVLLDRDFVEAVGSHVKNFLLIDTGVYAHGHSLRLPYFAKIGPDGSACGRLLPVFVIPPACEDVPAFVAAHADPRRFHFHAPPMFSAAPREIRVLHSLGGDYVSFFEKKASRNALEHFGRRETLTEVLGRYDVRPDAGETVEGFASELLGRIVACIEAHFPEHAREYQAVSVRRAVIKDDWVLLQLIPGRGALNQSLSCLRFKHGRASRATARTFLALSVGTNNRLCASLCQQCFATKCDNNRLHTLFTVDAGTPCSRSAPSSTSRPSSS

SEQ ID NO: 285 - protein, 117 aa, Human papillomavirus
MADDTAPHPPTQRYPLLDLLSWYNKCAPQTHCTPQRPLTTTTQTVQTEQHTTCPSKPHRHENDTDSVDSRHHSTCSTQTPASPASPAHPWTLDCVGSELTVKTVTSDGTTVEVRLRL

SEQ ID NO: 286 - protein, 469 aa, Epstein-Barr virus
MALQTDTQAWRVGIGTRGLMFSNCVPLHLPEGQYHKLRLPVSAYEALAVARYGLVGSLWEVPAVNSALQCLAAAAPCKDVKIYPSCIFQVHAPMFVTIKTSLRCLNPHDLCLCLICVGAAILDIPLLCAPRDGAGARAAEGQAAAAKGGKLRVWGRLSPSSPTSLSLAFPYAGPPPVAWYRHYIKLTRSEGVGIGKDCAQDHACPVPPQGHASSAADQAGVPERGRKRAHEGPEAGEAASTGRGDVALSQSRALLWRGLGWDTGRGRLAPGLAMSRDAASGSVHLDIQVDRAEEGWVCDVLLEPGPPTAREGCFLSMDPGLVTMKDAWTLFPLHPEHDAVVPPKEEIHVMAQGHLQGGTPSLWGFTFQEAACDQWVLRPRVWTAHSPIKMTVYNCGHKPLHIGPSTRLGLALFWPAERSDNLDAGRIFYQLTSGELYWGRTVARPPTLTLPVDELRPWPKLTPEEPMQH

SEQ ID NO: 287 - protein, 791 aa, Epstein-Barr virus
METQPSSPTSPSAPTADKKQQQNESLTAPPPSPATFVAAPDMQEMEESIQIDLGYVTPAEHEEELAVRFSTQEEIHQEQPEQEAKSEHDYLHQSGGEDALIKHLARQAIIVKDALLDRTEVPLSVEELSRAYELNLFSPRVPPKRQPNGTCEPNPRLNFYPVFAVPEALATYHIFFKNQRIPVSCRANRTRADSLFNLGPGARLPDIASLEEVPKIFEGLGSDETRAANALQGEGGDHEHHSALVELEGDNARLAVLKRTIELTHFAYPALNLPPKVMSTVMDQVLIKRASPISKEMQDPESSEEGKPVVSDEQLARWLGPQASPQSLEERRKLIMAVVLVTAELECLRRFFADAEILRKVEENLHYIFRHGFVRQACKISNVELTNLVSYMGILHENRLGQNVLHTTLRGEARRDYIRDCVYLYLCHTWQTAMGVWQQCLEEQNLKELCKLLQKNLKALWTGFDERTTASDLADLIFPERLRLTLRNGLPDFMSQSMLQNFRSFILERSGILPATCSALPSDFVPLTFRECPPPLWSHCYLLRLANYLAYHSDVIEDVSSEGLLECHCRCNLCTPHRSLACNPQLLSETQIIGTFELQGPGDEGSAAKGGLKLTPGLWTSAYLRKFVPEDYHPFEIRFYEDQSQPPKAELSACVITQGAILAQLQAIQKSRQEFLLKKGRGVYLDPQTGEELNPGFPQDAPRKQQEAESGAAARGGFGGRLGEQSGRGGGDGRLGQHSGRGQPARQSGRRGGGRGGGRSSRRRQTVVLGGESKQHGYHLRSGSGSRSTPQ

SEQ ID NO: 288 - protein, 109 aa, Epstein-Barr virus
MLEPLQILSICSFILSALHFMAWTIGHLNQIKRGVNLKIQIRNPNKEAINREVSILRHNYQKEIQAKETMKKILSDNMEVLGDHIVVEGLSTDEIIKMGETVLEVEELQ

SEQ ID NO: 289 - protein, 474 aa, Human adenovirus
MAGRQREHPTVTPYLQETSPERPPPLPPKKKLRKNLQVPEQVHAPALSPEVVPDSEEDEEVLYHGFSYPGVEVVQKGNGKRQIRRLEKTVIPRDLTPPEEEENNQSGSSKAVTMLITNPQVDPLVSAWEKGMELMNVLMEKYHVENDEKTAFKFLPEQNAVYRKICQTWLNEERRGLSLTFTTQKTFTELMGRFLAAYVETYAGVKHHNWDTTGCAVWAHGCTREEGVLRCFHGREMIQKEQVVEVDVGSENGQRALKEQPSKTKVVQNRWGRSVVQIKNDDARCCAEDVSCGNNMFSSKSCGLFFSEGLKAQIAFKQMQAFLQAEYPQMQRGQQRILVPLRCECLNKKDLVPQLGRQMCKVTPFALSGAEDLKTSEVTDKSALASILHPCVLVFQCANPVYRNSRGSAGPNCDFKISAPDVISALQLVRQFWKENVEDPLPKLIIPEFKWSTRLQYRNVALPTGHGDAEVEPF

SEQ ID NO: 290 - protein, 101 aa, Human immunodeficiency virus
MEPVDPSLEPWKHPGSQPKTACTNCYCKKCCLHCQVCFTTKGLGISYGRKKRRQRRRPPQDSQTHQVSLPKQPSSQQRGDPTGPKESKKKVERETETDPDN

SEQ ID NO: 291 - protein, 748 aa, Molluscum contagiosum virus
MLAVGPLREQFARLREQAPASGDLLRSAFCKLPFSVARELLAAGLHPRSVPRHWVPELLRALPEKLYLVRPRHMQLQDLLVVLERHSNLELYAAHLEYFKHELLRAADAFLLARCVPYLTLFDDDVRYLVDVFGAAAGSLLARANARSMYRMSYHFSEDLAEEMLLADARMHEPLYDHQPFTPAFLRRMFFTHGVVPANAGLRDEPSSQLAVAVLAGVACPRAAMRFLMALHRRVLRSAGLRDFVLISIINGQRLEHWLWYARHYLRAKAEAMHVYAPIYFDDVHVPLAQHTLTRERLQNICRFAERYARDMPALARTLLAGEHFDLLAQVLAYAPADVLSESVCLRVVRAAAVPVRAAHLLHSECVLLQCHERGYTDLVDFLDRLDVATLERNGVMPFSEYCFRSEWFNREPELLAMFVRYFGFCGAMMRRLLFEYPLAPDATACVLELMAGNPGMSLFEPTRMCSLRYLLCTTRRLRVRPLRGCVTLPRERTLRADGERRHFGSEADYDMLVALQIYCCEQLRSCAVRDLAFTRTREGVCLQFRTRARARGGELARLAAQMYDLALLAHRGLFCLPTEYLPRWLPVFDLLAGNELRAPARVEGDTLAPLEPADFVRYEDLGDAATAAYALREPAGSYHAALNALMGTLLAYLVLGSARVVPSEDAVPALVAALLRALRRGLKINERLEDTPLEVHAELVALRRAAASSCGGVTIPEPRALQSTLRLCEHACVAIILENNHSNKFSA

SEQ ID NO: 292 - protein, 860 aa, Human herpesvirus
MTIVVFATEYDAANVIFSILCRSPSEHLIFPIIVKYKPSNNVSFCLQTQKCKNSKRIDTVFVCHAEKLNLSHYIQTASPIKAEDVANSLNDKETELLYVDMILSQTGKEKEDVEFKYMAYFHKSLIIKYLTGKFLLPTSPFWFLSTYGQTEGLLLLTMYYYLFEEQKSTITTTKNYVQCFTENTGSMVFTYSSMSEFINITLKSKFRKLFADFATYARQKNLRDKEEFKYLDTQINLFRKSSHLTNTFRVHYIYIAYNTALETTKFVNYCNITSYDSNLPIGQQCQRNVHILGNSLHENLLCIMKQYFNADCYFKTYIDIKRLKNPDLNVTEYEYALASKKKTIQALTSEQITRAIAKCNKNGEGLFSPVKPGLQGLLEISASDKYVQIQDKRIYRRQHLHKDYHRPFPVFRVQLLHKNIFCFGNSEDWYENMGFNRILQYLPDEYISDEALTRAIWLQDTHFLCDDFEKQFYTTRHEIFNERIPVTNYIGDLDLPLQDTATITEETFFSMCRLIRLTLINAWKKIFPSIDTHTHPIFFFKTQCDTTNDALDYTEDPTEIKQFCICRKKIGLRISIPLPNGTAIAGGEPLKQLSKILNHVMCLDQELSQILNSLTFPGECFDIGIYHTGHCIRIGYMYKTDMDKGKMLHGRLTPIFIVPEGYRNSCKTFIQMQMDLNNLLHHGTKKAPIEELIYSITDKGCPKENLSFMDLKSRQLWNKVNIATDTLITKYLNTHGFNNNATSADDSLLSFIRLIGWPIIKTQLITHYETRIAQQFSQVTFLKIDSKNLQIKKTQFGRVSDFSCLNRQHRGNRDNVLVYIQLKADGNRLILILWSTCFATKCQSNSKQVHCSIALEQLKN

SEQ ID NO: 293 - protein, 100 aa, Human papillomavirus
MRGAAPTVADLNLELNDLVLPANLLSEEVLQSSDDEYEITEEESVVPFRIDTCCYRCEVAVRITLYAAELGLRTLEQLLVEGKLTFCCTACARSLNRNGR

SEQ ID NO: 294 - protein, 236 aa, Epstein-Barr virus
MAEAYPGGAHAALASRRSSFRNSLRRLRPTEKPDTSFMRGVWKYEIFPSYVRVTNKQVLQLDAQCQELPPCPSVGQILSFKLPSFSFNTTTYGSRYFTVAFLFFGAEDNEVFLKPFFVMHSAPGHRAKRPESAQPVHREREVYLVHCAHQIGQEPLPLPADSARAERHSADTLLHPERGQAKHQRAPDLPQWLSRHQPGRVPALPAGAAHAPISKVIRPYSHIPGEGMSGQRHTPR

SEQ ID NO: 295 - protein, 1193 aa, Human adenovirus
MALVQTHGSRGLHPEASDPGRQPSRRRSRQSSPGAVPEPARARRRRAPATTASGSRAAPTARRASSPPLLTMEAKPLPPAKKKRGTVVTPQGHGTLQAIDVATNGAVEIKYHLDLPRALEKLLQVNRAPPLPTDLTPQRLRTLDSSGLRALVLALRPVRAEVWTCLPRGLVSMTTIEAEEGQADHHDVVQHQMQAPRLHFPLKFLVKGTQVQLVQHVHPVQRCEHCGRLYKHKHECSARRRHFYFHHINSHSSNWWQEIQFFPIGSHPRTERLFLTYDVETYTWMGSFGKQLVPFMLVMKLSGDDRLVELALDLALQLKWDRWHGDPRTFYCVTPEKMAVGQQFRQYRDRLQTALAVDLWTSFLRANPHLADWALEQHGLSDPDELTYEELKKLPHVKGRPRFVELYIVGHNINGFDEIVLAAQVINNRAEVPQPFRITRNFMPRAGKILFNDVTFALPNPAYKKRTDFQLWEQGGCDDIDFKHQFLKVMVRDTFALTHTSLRKAAQAYALPVEKGCCAYKAVNQFYMLGSYRADQDGFPLEEYWKDREEFLLNRELWKQKGQLKYDIIQETLDYCALDVLVTAELVAKLQDSYAHFIRDSVGLPHAHFNIFQRPTISSNSHAIFRQIVYRAEKPSRANLGAGLLAPSHELYDYVRASIRGGRCYPTYIGILDEPLYVYDICGMYASALTHPMPWGTPLSPYERALAVREWQASLDDLGTCISYFDPDLLPGIFTIDADPPDELMLDPLPPFCSRKGGRLCWTNEPLRGEVATSVDLITLHNRGWQVRIVPDELTTVFPEWKCVAREYVQLNIAAKERADKEKNQTMRSIAKLLSNALYGSFATKLDNKKIVFSDQMDEGLLKGISAGTVNIKSSSFLETDNLSAEVMPAFEREYLPQQLALLDSDPEDSEDEQRPAPFYTPPAGTPGHVAYTYKPITFLDVDEGDMCLHTLEKVDPLVDNDRYPSHVASFVLAWTRAFVSEWSGFLYDEDRGVPLEDRPIKSVYGDTDSLFVTQRGHELMETRGKKRIKKNGGKLVFDPNQPDLTWLVECETVCAHCGADAYAPESVFLAPKLYALKSLLCPACGQTSKGKLRAKGHAAEALNYELMVNCYLADAQGADRERFSTSRMSLKRTLASAQPGAHPFTVTETTLTRTLRPWKDRTLAALDAHRLAPYSRSRPNPRNEEVCWIEMP

SEQ ID NO: 296 - protein, 310 aa, Epstein-Barr virus
MASSNRGNARPLKSFLHELYLKHYPEVGDVVHLLNTIGVDCDLPPSHPLLTAQRGLFLARVLQAVQQHKLLEDTIVPKILKKLAYFLELLSYYSPKDEQRDIAEVLDHLKTNRDLGLDDRLWALIRKLRQDRHHASVNVLMPGSDYTAVSLQYYDGISIGMRKVIADVCRSGYASMPSMTATHNLSHQLLMASGPSEEPCAWRGFFNQVLLWTVALCKFRRCIYYNYIQGSIATISQLLHLEIKALCSWIISQDGMRLFQHSRPLLTLWESVAANQEVTDAITLPDCAEYIDLLKHTKHVLENCSAMQYK

SEQ ID NO: 297 - protein, 472 aa, Human adenovirus
MERPNPSVGGIYSGLHDNGPVENPAAEEEGLRLLAGAASARSGSSAGGGGGGGGGGEPEGRSGSSNGIVTEPDPEEGTSSGQRGEKRKLENDGADFLKELTLSLMSRCYPESVWWADLEDEFKNGNMNLLYKYGFEQLKTHWMEPWEDWELALNMFAKVALRPDTIYTIKKTVNIRKCAYVIGNGAVVRFQTFDRVVFNCAMQSLGPGVIGMSGVTFNNVRFAADGFNGKVFASTTQLTLHGVFFQNCSGVCVDSWGRVSARGCTFVGCWKGLVGQNKSQMSVKKCVFERCILAMVVEGQARIRHNAGSENVCFLLLKGTASVKHNMICGTGHSQLLTCADGNCQTLKVIHVVSHQRRPWPVFEHNMLMRCTMHLGARRGMFSPYQSNFCHTKVLMETDAFSRVWWSGVFDLTIELYKVVRYDELKARCRPCECGANHIRLYPATLNVTEQLRTDHQMLSCLRTDYESSDED

SEQ ID NO: 298 - protein, 199 aa, Varicella-zoster virus
MSGHTPTYASHRRNRVKLVEAHNRAGLFKERTLDLIRGGASVQDPAFVYAFTAAKEACADLNNQLRSAARIASVEQKIRDIQSKVEEQTSIQQILNTNRRYIAPDFIRGLDKTEDDNTDNIDRLEDAVGPNIEHENHTWFGEDDEALLTQWMLTTHPPTSKYLQLQDLCVPTTIPTDMNQMQPQPISKNENPPTPHTDV

SEQ ID NO: 299 - protein, 169 aa, Human adenovirus
MLASVVIKTPSYLIVLRKSSTVAYANPNQAMQLDCVSSSRGEGRDGRIMLIFIPNDLAVLQIVDRADGIYRPHCVGEKAQLNQKKCDFQGAQRWLPTKPPRAHPKTKEYQKKEHFLTPQTSYYIPAPFPDNFQLSSLQLFVSVLVVNPNHTLQTGPGGRPPPPFLNTPS

SEQ ID NO: 300 - protein, 843 aa, Human herpesvirus
METTYRREALTVRVIFCTSGDSAETIADVLTGAPTSASFFSVLHDLFYSQILAPRVTLKLCLPARRPGNGTRCSPVLVLRTDASVASGFLGGRPLEASDIKYMLLSDQTAGLFKPLLEIIGGARAPPNQDACTFQSQVAWLRTKFVTALRKLYKMTPSPYWMLSAFGAQEAQFVLTSSFYFFEHTVVCTTETVSHLSRLFSPQQGQTLVSVTSHEELGQLYGTSPFRRRVPAFVAYVKEKLARDSLETEAIDRTIDQIRGKLMLSNQDLVHFIYISFYQCLNKRAFLRYSRQTSSSSALRELGEDPQLCGALHGEFRDHVQSYYHKKTYLSTYIDIRYVGGVLPDGYFGGSLVGERCVYWCGQSKDTASLLATISQQVPHLRLQNEFAGMLDVAALRGSDDGQFKEGLFSHSQALPLYRCEFLGKQFFTMLQEDGLERYWEQSVIFPGDQDWDMLSDKDLTYRIFYHDLSLSLPTLKEQLLVSRHEYFNPRLPVYRWVLDFDLPVCRDIDRTFEEVHSLCCSLREAILDIIQLLGPVDPRTHPVYFFKSACPPDEWRGEDVASTSFCRCHDKLGMRIIVPFPEGVCVVGSEPMVALTGILNRTIKLDPELVHRFPSIQKKGGPFDCGIYGRGRSVRLPHCYKVGLVGELCRLLKILVCHPAPNGKAQYVRRAFTLRELLHHSPGHSAGHVGRIIYSIMDRNENFLENKTISYLPAKIPHIFQRIETLSGRSIEDWLHSAVWDKAYDTICKFFPDEKAQQFSHVAFTQQGENIIQLRPRQGRHFLCINHNHKNKSKTVRVFLTLHSIRVSEVTVTLMSQCFASKCNNNVPTAHFSFVVPVGLAS

SEQ ID NO: 301 - protein, 158 aa, Human papillomavirus
MARFDDPKQRPYKLPDLCTELNTSLQDVSIACVYCKATLERTEVYQFAFKDLCIVYRDCIAYAACHKCIDFYSRIRELRYYSNSVYGETLEKITNTELYNLLIRCLRCQKPLNPAEKRRHLKDKRRFHSIAGQYRGQCNTCCDQARQERLRRRRETQV

SEQ ID NO: 302 - protein, 250 aa, Vaccinia virus
MGAAASIQTTVNTLSERISSKLEQEANASAQTKCDIEIGNFYIRQNHGCNLTVKNMCSADADAQLDAVLSAATETYSGLTPEQKAYVPAMFTAALNIQTSVNTVVRDFENYVKQTCNSSAVVDNKLKIQNVIIDECYGAPGSPTNLEFINTGSSKGNCAIKALMQLTTKATTQIAPRQVAGTGVQFYMIVIGVIILAALFMYYAKRMLFTSTNDKIKLILANKENVHWTTYMDTFFRTSPMVIATTDMQN

SEQ ID NO: 303 - protein, 528 aa, Human adenovirus
MKRARPSEDTFNPVYPYDTETGPPTVPFLTPPFVSPNGFQESPPGVLSLRLSEPLVTSHGMLALKMGSGLSLDQAGNLTSNTITVSQPLKKTKSNITLETSAPLTVSSGALTMATTSPLVVSDNTLTMQSQAPLTVQDSKLSIATKEPLTVLDGKLALQTSAPLSATDNNALTITASPPLTTANGSLAVTMENPLYNNNGKLGLKIGGPLQVATDSHALTLGTGQGVAVHNNLLHTKVTGAIGFDTSGNMELKTGDGLYVDSAGPNQKLHINLNTTKGLAFDNTAITINAGKGLEFETDSSNGNPIKTKIGSGIQYNTNGAMVAKLGTGLSFDSSGAITMGSINNDRLTLWTTPDPSPNCRIASDKDCKLTLALTKCGSQILGTVSALAVSGNMASINGTLSSVNLVLRFDDNGVLMSNSSLDKQYWNFRNGDSTNGQPYTYAVGFMPNLKAYPKTQSKTAKSNIVSQVYLNGDKSKPLHFTITLNGTDETNQVSKYSISFSWSWNSGQYTNDKFATNSYTFSYIAQE

SEQ ID NO: 304 - protein, 331 aa, Vaccinia virus
MDIYDDKGLQTIKLFNNEFDCIRNDIRELFKHVTDSDSIQLPMEDNSDIIENIRKILYRRLKNVECVDIDSTITFMKYDPNDDNKRTCSNWVPLTNNYMEYCLVIYLETPICGGKIKLYHPTGNIKSDKDIMFAKTLDFKSKKVLTGRKTIAVLDISVSYNRSITTIHYNDDVNIDIHTDKNGKELCYCYITIDDHYLVDVETIGVIVNRSGKCLLVNNHLGIGIVKDKRISDSFGDVCMDTIFDFSEARELFSLTNDDNRNIAWDTDKLDDDTDIWTPVTEDDYKFLSRLVLYAKSQSDTVFDYYVLTGDTEPPTVFIFKVTRFYFNMLK

SEQ ID NO: 305 - protein, 777 aa, Human adenovirus
MEEDLIQPQPDSETLTSPTSEVGAVELVEHEDDERVEQDPGYVTPPKDGKESVPVSPLTEADYLGGEDDVLLKHVLRQSTIVQEAFKDYSGFPLTVEELSRTYEANLFSPRVPPKKQANGTCEPNPRLNFYPVFAVPEALATYHIFFKNQRIPLSCRANRTQGDRILHLKAGAHIPEIVSLEEVPKIFEGLGKDEKRAANALQKSETENQNVLVELDGDNARLAVLKRTIEVSHFAYPALNLPPKVMRSVMDHLLIKRVEPLDSDQPEQNSEDGQPVVSDDDLARWLDSHDPTTLQERRKMMMAVILVTVELECLQRFFANPQTLRKIEESLHYAFRHGYVRQACKISNVELSNLVSYMGILHENRLGQNVLHCTLQGEARRDYVRDCIYLFLILTWQTAMGVWQQCLEERNLRELEKLLVRNRRELWTAFSERTAACQLADLIFPERLMQTLQNGLPDFVSQSILQNFRSFILERSGILPAMSCALPSDFVPLCYRECPPPLWSHCYLLRLANYLAHHSDLMENSSGEGLLECHCRCNLCTPHRSLVCNTELLSETQVIGTFEIQGPERQEGASNLKLTPALWTSAYLRKFIPEDYHAHQIKFYEDQSRPPKAPLTACVITQSQILAQLQAIQQARQEFLLKKGHGVYLDPQTGEELNTPSPSAAASCRPQKHAAQREQASHCGSAVPKATETARAVGRGGGILGRQPGRGSFRRGGNGELGKSRRGAGGQTPQGRGGRNHRQRRGTVFQRTRSEPASDGESRTVPAAARLVESQP

SEQ ID NO: 306 - protein, 95 aa, Human adenovirus
MVKMRLSSGNSSATCTTFIPEGPGRLSGSMGSAPAAAAAWLPPAVAPPSVLLPGGRKTTVAGDSCVSPPLSTDAWPENPAGTPRSDGFLRSIYPL

SEQ ID NO: 307 - protein, 197 aa, Human adenovirus
MNWLSAGPSMISRVNDIRAYRNQLLLEQSALTTTPRQHLNPRNWPAALVYQETPAPTTVLLPRDAQAEVQMTNAGVQLAGGSALCRHRPQQSIKRLVIRGRGIQLNDESVSSSLGLRPDGVFQIAGCGRSSFTPRQAVLTLESSSSQPRSGGIGTLQFVEEFTPSVYFNPFSGSPGQYPDEFIPNFDAISESVDGYD

SEQ ID NO: 308 - protein, 209 aa, Human adenovirus
MSGSSERELASIVRDLGCGPTFWAPTTQRFPGFLAGDKLACAIVNTAGRETGGVHWLAFGWNPRSRTCYMFDPFGFSDRRLKQIYSFEYEAMLRRSAVASSPDRCLSLEQSTQTVQGPDSAACGLFCCMFLHAFVHWPDRPMDGNPTMNLLTGVPNGMLQSPQVLPTLRRNQEELYRFLARHSPYFRSHRAAIEHATAFDKMKQLRVSQ

SEQ ID NO: 309 - protein, 156 aa, Human papillomavirus
MAQKALEQTTVKEEKLELPTTIRGLAQLLDIPLVDCLLPCNFCGRFLDYLEVCEFDYKKLTLIWKDYSVYACCRLCCSATATYEFNVFYQQTVLGRDIELATGLSIFEIDIRCHTCLSFLDIIEKLDSCGRGLPFHKVRNAWKGVCRQCKHFYNDW

SEQ ID NO: 310 - protein, 72 aa, Human adenovirus
MALTCRMRIPIPGYRGRPRRRKGLTGNGRFRRRSMRRRMKGGVLPFLIPLIAAAIGAVPGIASVALQASRKN

SEQ ID NO: 311 - protein, 227 aa, Human adenovirus
MSKEIPTPYMWSYQPQMGLAAGAAQDYSTRMNWLSAGPGMISRVNDIRAHRNQILLEQSALTATPRNHLNPRNWPAALVYQEIPQPTTVLLPRDAQAEVQLTNSGVQLAGGATLCRHHPAQGIKRLVIRGRGTQLNDEVVSSSLGLRPDGVFQLAGSGRSSFTPRQAVLTLESSSSQPRSGGIGTLQFVEEFTPSVYFNPFSGSPGHYPDEFIPNFDAISESVDGYD

SEQ ID NO: 312 - protein, 330 aa, Variola virus
MDIYNDKGLQTIKLFNNEFDCIRNDIRELFKHVTDSDSIQLPMEDNSDIIENIRKILYRRLKNVECVDIDSTITFMKYDPNDDNKRTCSNWVPLTNNYMEYCLVIYLETPICGGKIKLYHPTGNIKSDKDIMFAKTLDFKSKKVLTGRKTIAVLDISVSYNRSMTTIHYGDVDIDIHTDKNGKELCYCYITIDDHYLVNVETIGVIVNRSGKCLLVNNHLGIGIVKDKRISDSFGDVCMDTIFDFSEARELFSLTNDDNRNIAWDTDKLDDDTDIWTPVTEDDYKFLSRLVLYAKSQSDTVFDHYVLTGDTEPPTVFIFKVTRFYFNILK

SEQ ID NO: 313 - protein, 251 aa, Human adenovirus
MRMLPDFFTGNWDDMFQGLLEAEHPFDFPEPSQAFEEISLHNLFDVELDESEGDPNEEAVDGMFPNWMLSEDHSADSGAASGDSGVGEDLVEVNLDLKCYEEGLPPSGSEADEAEERAEEEETAVSNYVNIAEGASQLVLDCPENPGRGCRACDFHRGSSGNPEAMCALCYMRLTGHCIYSPISDAEGECELGSNEETELPCSLTATAPVRPTPCRVSCRRRPAVDCIEDLLEEDPTDEPLNLSLKRPKSS

SEQ ID NO: 314 - protein, 225 aa, Human cytomegalovirus
MRIQLLLVATLVASIVATRVEDMATFRTEKQWQQDLQYRREFVKRQLAPKPKSNIVVSHTVSCVIDGGNMTSVWRFEGQFNPHIASEVILHDTSGLYNVPHEIQNDGQVLTVTVKRSAPADIAKVLISLKPVQLSSGQYECRPQLQLPWVPRPSSFMYDSYRLWYEKRWLTIILYVFMWTYLVTLLQYCIVRFIGTRLFYFLQRNITIRFTGKPTYNLLTYPVKG

SEQ ID NO: 315 - protein, 146 aa, Human adenovirus
MKAFAVLFVLSLIKTELRPSYGLPLLQSGLYNTNQIFQKTQTLPPLIQDSNSTLPAPSTTNLPETNKLGSHLQHRLSRSLLSANTTTPKTGGELRGLPTDDPWVVAGFVTLGVVAGGLVLILCYLYIPCCAYLVILRCWFKKWGPY

SEQ ID NO: 316 - protein, 133 aa, Variola virus
MAEWHKIIEDISKNNNFEDAAIVDYKTTKNVLAAIPNRTFAKINPGEVIPLITNHNILKPLIGQKFCIVYTNSLMDENTYAMELLTGYAPVSPIVIARTHTALIFLMGKPTTSRRDVYRTCRDHATRVRATGN

SEQ ID NO: 317 - protein, 155 aa, Human papillomavirus
MEPQFNNPQERPRSLHHLSEVLEIPLIDLRLSCVYCKKELTRAEVYNFACTELKLVYRDDFPYAVCRVCLLFYSKVRKYRYYDYSVYGATLESITKKQLCDLLIRCYRCQSPLTPEEKQLHCDRKRRFHLIAHGWTGSCLGCWRQTSREPRESTV

SEQ ID NO: 318 - protein, 469 aa, Epstein-Barr virus
MALQTDTHAWRVEIGTRGLMFSNCVPLHLPEGQYHKLRLPVSAYEALAVARYGLVGSLWEVPAVNSALQCLAAAAPCKDVKIYPSCIFQVHAPMFVTIKTSLRCLNPHDLCLCLICVGAAILDIPLLCAPRDGAGARAAEGQAAAAQGGKLRVWGRLSPSSPISLSLAFPYAGPPPVAWYRHSIKLTRSEGVGIGKDCAQDHACPVPPQGHASSAADQAGVPERGRKRAHEGPGAGEAASAGRGDVALSQSRALLWRGLGWDTGRGRLAPGLAMSRDAASGSVHLDIQVDRAEEGWVCDVLLEPGPPTAREGCFLSMDPGLVTLKDAWTLFPLHPEHDAVVPPKEEIHVMAQGHLQGGTPSLWGFTFQEAACDQWVLRPRVWTAHSPIKMTVYNCGHKPLHIGPSTRLGLALFWPAERSDNLDAGRIFYQLTSGELYWGRTVARPPTLTLPVDELRPWPKLTPEEPMQH

SEQ ID NO: 319 - protein, 90 aa, Vaccinia virus [sequence omitted]

SEQ ID NO: 320 - protein, 98 aa, Epstein-Barr virus
MRPGRPLAGFYATLRRSFRRMSKRSKNKAKKERVPVEDRPPTPMPTSQRLIRRNALGGGVRPDAEDCIQRFHPLEPALGVSTKNFDLLSLRCELGWCG

SEQ ID NO: 321 - protein, 233 aa, Human adenovirus
MSKEIPTPYMWSYQPQMGLAAGASQDYSSRMNWLSAGPHMIGRVNGIRATRNQILLEQAALTSTPRSQLNPPNWPAVQVYQENPAPTTVLLPRDAEAEVQMTNSGAQLAGGSRHVRFRGRSSPYSPGPIKRLIIRGRGIQLNDEVVSSLTGLRPDGVFQLGGAGRSSFTPRQAYLTLQSSSSQPRSGGIGTLQFVEEFVPSVYFNPFSGAPGLYPDDFIPNYDAVSESVDGYD

SEQ ID NO: 322 - protein, 225 aa, Human cytomegalovirus
MRIQLLLVSTLVASIVATRVEDMATFRTEKQWQQDLQYRREFVKRQLAPKPKSNIVVSHTVSCVIDGGNMTSVWRFEGQFNPHIASEVILHDTSGLYNVPHEVQNDGQVLTVTVKRSAPADIAKVLISLKPVQLSSGQYECRPQLQLPWVPRPSSFMYDSYRLWYEKRWLTIILYVFMWTYLVTLLQYCIVRFIGTRLFYFLQRNITIRFTGKPTYNLLTYPVKG

SEQ ID NO: 323 - protein, 230 aa, Human adenovirus
MRHLRFLPQEIISSETGIEILEFVVNTLMGDDPEPPVQPFDPPTLHDLYDLEVDGPEDPNEEAVNGFFTDSMLLAADEGLDINPPPETLVTPGVVVESGRGGKKLPDLGAAEMDLRCYEEGFPPSDDEDGETEQSIHTAVNEGVKAASDVFKLDCPELPGHGCPVSDDESPSPDSTTSPPEIQAPAPANVCKPIPVKPKPGKRPAVDKLEDLLEGGDGPLDLSTRKLPRQ

SEQ ID NO: 324 - protein, 584 aa, Human T-cell leukemia virus
MGKTYSSPINPIPKAPKGLAIHHWLNFLQAAYRLQPGPSEFDFHQLRKFLKLAIKTPVWLNPINYSVLAGLIPKNYPGRVHEIVAILIQETPAREAPPSAPLAEDPQKPPPYPEQAQEASQCLPILHPHGAPAAHRPWQMKDLQAIKQEVSSSAPGSPQFMQTIRLAVQQFDPTAKDLHDLLQYLCSSLVASLHHQQLETLIAQAETQGITGYNPLAGPLRIQANNPNQQGLRKEYQNLWLSAFSALPGNTKDPTWAAILQGPEEPFGSFVERLNVALDNGLPEGTPKDPILRSLAYSNANKECQKLLQARGQTNSPLGEMLRACQTWTPRDKNKILMVQPKKTPPPNQPCFRCGQVGHWSRDCKQPRPPPGPCPVCQDPTHWKRDCPQLKTDTRDSEDLLLDLPCEAPNVRERKNLLRGGGLASPRTILPLIPLSQQKQPTLHIQVSFSNTPPVSVQALLDTGADITVLPACLCPPDSNLQDTTVLGAGGPSTNKFKILPCPVHIHLPFRRQPVTLTACLIDINNQWTILGRDALQQCQSSLYLADQPSKVLPVLAPKLIGLEHLPPPPEVSQFPLNQSASRL

SEQ ID NO: 325 - protein, 149 aa, Human papillomavirus
MFQDAEEKPRTLHDLCQALETSVHEIELKCVECKKTLQRSEVYDFVFADLRIVYRDGNPFAVCKVCLRLLSKISEYRHYNYSLYGDTLEQTLKKCLNEILIRCIICQRPLCPQEKKRHVDLNKRFHNISGRWTGRCAVCWRPRRRQTQV

SEQ ID NO: 326 - protein, 469 aa, Epstein-Barr virus
MALQTDTQAWRVEIGTRGLMFSNCVPLHLPEGQYHKLRLPVSAYEALAVARYGLVGSLWEVPAVNSALQCLAAAAPCKDVKIYPSCIFQVHAPMFVTIKTSLRCLNPHDLCLCLICVGAAILDIPLLCAPRDGAGARAAEGQAAAAQGGKLRVWGRLSPSSPTSLSLAFPYAGPPPVAWYRHSINLTRSEGVGIGKDCAQDHACPVPPQGHASSAADQAGVPERGRKRAHEGPGAGEAASAGRGDVALSQSRALLWRGLGWDTGRGRLAPGLAMSRDAASGSVHLDIQVDRAEEGWVCDVLLEPGPPTAREGCSLSMDPGLVTLKDAWTLFPLHPEHDAVVPPKEEIHVMAQGHLQGGTPSLWGFTFQEAACDQWVLRPRVWTAHSPIKMTVYNCGHKPLHIGPSTRLGLALFWPAERSDNLDAGRIFYQLTSGELYWGRTVARPPTLTLPVDELRPWPKLTPEEPMQH

SEQ ID NO: 327 - protein, 111 aa, Vaccinia virus
MASLLYLILFLLFVCISYYFTYYPTNKLQAAVMETDRENAIIRQRNDEIPTRTLDTAIFTDASTVASAQIHLYYNSNIGKIIMSLNGKKHTFNLYDDNDIRTLLPILLLSK

SEQ ID NO: 328 - protein, 537 aa, Epstein-Barr virus
MSGQQRGSVILVPEHLAGALTKLMSDFITGQDVTLSGGNIAVKIRDAINQTPGGGDVAILSSLFALWNALPTSGRQSSRDDLIPAAVQALTTAHNLCLGVIPGETSHKDTPESLLRAIVTGLQKLWVDSCGCPECLQCLKGLKAIKPGLYEIPRIIPHTKQCSPVNLLNMLVHKLVALRGHVQLAYDARVLTPDFHEIPDLDDSDAVFARTLLAALFHLNMFFILKDYITQDSMSLKQALSGHWMSATGNPLPAAPETLRNYLEAFRNSDNHFYLPTTGPLNTFKFPEELLGRVVVIDSSLCAASHVQDVITRGVGAGVPRPRFLALPPAPSREPQQTCSQLTSRGNESSRRNLGQPGGTSPAVPPVCPIVSLAASRAKQNRGGTGSLHLAQPEGTSPAVSPVCPIASPAASRSKQHCGVTGSSQAAPSSSSVTPVASLSGDLEEEEEGSRESPSPPSSKKGAEEFEAWLEAQDANLEDVQREFSGLRVIGDEDEDGSEDGEFSDLDLSDSDHEGDEGGGAVGGGRSLHSLYSLSVV

SEQ ID NO: 329 - protein, 266 aa, Human adenovirus
MEDINFASLAPRHGSRPFMGTWNEIGTSQLNGGAFSWSSLWSGIKNFGSSIKSFGNKAWNSNTGQMLRDKLKDQNFQQKVVDGLASGINGVVDIANQALQNQINQRLENSRQPPVALKQRPTPEPEEVEVEEKLPPLETAPPLPSKGEKRPRPELEETLVVESREPPSYEQALKEGASYPMTRPIGSMARPVYGKEKTPVTLELPPPAPTVPPMPTPTLGTNVPRLAAPTVAVATPARRVRGANWQSTLNSIVGLGVKSLKRRRCY

SEQ ID NO: 330 - protein, 227 aa, Human cytomegalovirus
MRRWLRLLVGLGCCWVTLAHAGNPYEDDDYYYYREDEPRQHGEPNYVAPPARQFRFPPLNNVSSYQASCVVKDGVLDAVWRVQGTFYPEKGIVARVGWSGRRGRKWGRLHAPECLVETTEAVFRLRQWVPTDLDHLTLHLVPCTKCKPMWCQPRYHIRYFSYGNSVDNLRRLHYEYRHLELGVVIAICMAMVLLLGYVLARTVYRVSSAYYLRWHACVPQKCEKSLC

SEQ ID NO: 331 - protein, 135 aa, Human adenovirus
MTEILTTSNSAEDLLDMDGRVSEQRLAQLRIRQQQERVTKELRDVIQIHQCKKGIFCLVKQAKISYEITATDHRLSYELGPQRQKFTCMVGITPIVITQQSGDTKGCIHCSCDSIECTYTLLKTLCGLRDLLPMN

SEQ ID NO: 332 - protein, 71 aa, JC polyomavirus
MVLRQLSRKASVKVSKTWSGTKKRAQRILIFLLEFLLDFCTGEDSVDGKKRQRHSGLTEQTYSALPEPKAT

SEQ ID NO: 333 - protein, 96 aa, Human papillomavirus
MIGKEVTLQDIVLELTEPQTVDLHCEEELPEQDTEVEPERRAYKIILCCGGGCGTRLRLFVAATQFGIRGLQDLLLEEVVILCPDCRNSDLQHGGQ

SEQ ID NO: 334 - protein, 429 aa, Epstein-Barr virus
MAEAYPGGAHAALASRRSSFRNSLRRLRPTEKPDTSFMRGVWKYEIFPSYVRVTNKQVLQLDAQCQELPPCPSVGQILSFKLPSFSFNTTTYGSRYFTVAFLFFGAEDNEVFLKPFFVMHSDQDIVLSVLNPRSLFIEKGKFTWYIVPIRLVKNPYLYLQILPGQSDIQLTRSCTQSGDKLNTSEPQIFLSGSPVTSQDECLPYLLAQHTPPFLKSYARIHTFPGKVCPVNAIRRGKGYVRVSVDTPDLKREGPLNVKVGMTLLDDVIIAFRYNPYPKSHWRWDGESTDIRYFGSPVIIPPNFITELEYNNTYEAPLSSKITAVVVSHSSNPVFYVYPQEWKPGQTLKLTVRNISNNPITIVTGQSMAQAFFIYAGDPSISTIMRRYIQRQGCALTLPGNIVVESSSLPTFERINKTFNGNIVASEGTL

SEQ ID NO: 335 - protein, 200 aa, Vaccinia virus
MKPKVNNIGNTPLHNYVSQYDITLIPHPQPIKKWKLKPSISINGYRSTFTMAFPCAQFRPCHCHATKDSLNTVADVRHCLTEYILWVSHRWTHRESAGSLYRLLISFRTDATELFGGELKDSLPWDNIDNCVEIIKCFIRNDSMKTAEELRAIIGLCTQSAIVSGRVFNDKYIDILLMLRKILNENDYLTLLDHIRTAKY

SEQ ID NO: 336 - protein, 404 aa, Epstein-Barr virus
MLKCKQPGARFIHGAVHLPSGQIVFHTIHSPTLASALGLPGENVPIPALFRASGLNVRESLPMTNMRAPIISLARLILAPNPYILEGQLTVGMTQDNGIPVLFARPVIEVKSGPESNIKASSQLMIAEDSCLNQIAPFSASEHPAFSMVESVKRVRVDEGANTRRTIRDILEIPVTVLSSLQLSPTKSILKKAPEPPPPEPQATFDAAPYARIFYDIGRQVPKLGNAPAAQVSNVLIANRSHNSLRLVPNPDLLPLQHLYLKHVVLKSLNLENIVQDFEAIFTSPSDTISEAETKAFEKLVEQAKNTVENIVFCLNSICSTSTLPDVVPDVNNPNISLALEKYFLMFPPSGTIMRNVRFATPIVRLLCQGAELGTMAQFLGKYIKVKKETGMYTLVKLYYLLRI

SEQ ID NO: 337 - protein, 121 aa, Human adenovirus
MPLPSLPPPPVSRDQGLCIAWLELALTCCLNVYGDIIRYNVSISPRAEELLSGLQEWLNIALKTERARQRNHRFANICWQRVRFLKQKYEAVRKLLIYDATRQMVSLQTEFVPSPPPSTSL

SEQ ID NO: 338 - protein, 64 aa, Human cytomegalovirus
MLKFLLKFRKRRRPVVVPRFVRFIVYVVLFTVAVQRVKQERDAHLRRYEERLRKNRARRRQSFP

SEQ ID NO: 339 - protein, 122 aa, Human adenovirus
MILPSLPSPLLLETQSSCIAWLGFAYATVDDFLRTIKYDGVLITTEASILLTNLRVWLYLNYQTEHTKRQDRRRRRVCCARAAFCYTKYENVRKQLHYDKVARTLHIMRQTSPLHQSPVTTM

SEQ ID NO: 340 - protein, 346 aa, Vaccinia virus
MAVYAVTGGAGFLGRYIVKLLISADDVQEIRVIDIVEDPQPITSKVKVINYIQCDINDFDKVREALDGVNLIIHTAALVDVFGKYTDNEIMKVNYYGTQTILAACVDLGIKYLIYTSSMEAIGPNKHGDPFIGHEHTLYDISPGHVYAKSKRMAEQLVMKANNSVIMNGAKLYTCCLRPTGIYGEGDKLTKVFYEQCKQHGNIMYRTVDDNAVHSRVYVGNAAWMHVLAAKYIQYPGSKIKGNAYFCYDYSPSCSYDMFNLLLMKPLGIEQGSRIPRWMLKMYACKNDMKRILFRKPSLLNNYTLKISNTTFEVRTNNAELDFNYSPIFDVDVAFKRTRKWLEESE

SEQ ID NO: 341 - protein, 92 aa, Human papillomavirus
MHGTRPSLADITLILEEIPEIIDLHCDEQFDSSEEENNHQLTEPAVQAYGVVTTCCKCGRAVRLVVECGPEDIRDLEQLFLKTLNLVCPHCA

SEQ ID NO: 342 - protein, 214 aa, Hepatitis delta virus
MSRPEGRKNRGGREEVLEQWVSGRKKLEELERDLRKVKKKIKKLEDEHPWLGNIKGILGKKDKDGEGAPPAKRARTDQMEVDSGPRKRPSRGGFTDKERQDHRRRKALENKRKQLSAGGKNLSKEEEEELRRLTEEDERRERRIAGPQVGGVNPLEGGTRGAPGGGFVPSMQGVPESPFTRTGEGLDIRGSQGFPWDILFPADPPSSPQSCRPQ

SEQ ID NO: 343 - protein, 97 aa, Vaccinia virus
MSIIYNLQSGYWNMERVSRSIINTAIQKSSYQRENKTKLVDLLLSYHPTLETMIDAFNRDIRYLYPEPLFACIRYALILDDDFPSKVSMISPVIIRN

SEQ ID NO: 344 - protein, 310 aa, Epstein-Barr virus; identical to SEQ ID NO: 296

SEQ ID NO: 345 - protein, 214 aa, Human adenovirus
MGSSEQELVAIARDLGCGSYFLGTFDKRFPGFMAPNKLACAIVNTAGRETGGVHWLALAWNPKSHTCYLFDPFGFSDERLKQIYQFEYEGLLKRSALASTPDHCITLVKSTQTVQGPFSAACGLFCCMFLHAFIHWPSNPMEQNPTMDLLTGVPNSMLQSPQVEPTLRRNQERLYRFLTQHSPYFRRHRERIEKATAFDQMKNAQVLFHNKIFY

SEQ ID NO: 346 - protein, 281 aa, Human cytomegalovirus
MVQIQFHQGEPLGHKKEKPPPVSPPSPPPIRRVTVITKDEDTLRSVQHFLWMVRLYGTVVFQTSATIATTILFMLIPWRVTAPYLRDTLPFWSTLLPCALRCHAYWLERRRRPGTLMLVMVYTTLTTISVSTIGLCFDRTVVIQAYVLSSMLCVWCTGLAWLMAWNMQRRLAILCLLSFMLPILWLFIAVQSWEPYQRIILALTVSFIYGLKIVLIRDTLTVLYRSPSNCYTDGDLLRTAMLLYMDQVIMFLLVVVPLTAPIWYPNYAGALGRTAHWLFHK

SEQ ID NO: 347 - protein, 145 aa, Human adenovirus
MNGTTQDNAALFDGGVFSPYLTSRLPYWAGVRQNVMGSTLDGRPVAPANSSTLTYATVGPSPLDTATAAAASAAASTARSMAADFNFYSHLASNAVTRTAVREDILTMMLAKLETLTAQLEDLSQKVEELAVASTRTPPAQPVAQ

SEQ ID NO: 348 - protein, 210 aa, Variola virus
MEAIGPNKHGNPFIGHEHTLYDISPGHVYAKSKRMVEQLVTKANNSVIMNGAKLYTCCLRPTGIYGGGDKLTKVFYEQCTQHGNIMYRTVDDDAVHSRVYVGNVAWMHVLAVKYIQYPGSEIKGNAYFCYGYSPSCSYDMFNLLLMKPLGIEQGSRIPRWMLKMYTCKNDMKRILFRKPSLLNNYTLKISNTTFEARQQCRTRFQLLPYL

SEQ ID NO: 349 - protein, 98 aa, Human papillomavirus
MRGETPTLQDYVLDLQPEATDLHCYEQLPDSSDEEDVIDSPAGQAEPDTSNYNIVTFCCQCKSTLRLCVQSTQVDIRILQELLMGSFGIVCPNCSTRL

SEQ ID NO: 350 - protein, 205 aa, Variola virus
MSRGALIVFEGLDKSGKTTQCMNIMESIPTNTIKYLNFPQRSTVTGKMIDDYLTRKKTYNDHIVNLLFCANRWEFASFIQEQLEQGITLIVDRYAFSGVAYATAKGASMTLSKSYESGLPKPDLVIFLESGSKEINRNVGEEIYEDVAFQQKVLQEYKKMIEEGEDIHWQIISSEFEEDVKKELIKNIVIEAIHTVTGPVGQLWM

SEQ ID NO: 351 - protein, 185 aa, Cowpox virus
MNQYNVKYLAKILCLKTEIARDPYAVINRNVLLRYTTDIEYNDLVTLITVRHKIDSMKTVFQVFNESSINYTPVDDDYGEPIIITSYLQKGHNKFPVNFLYIDVVISDLFPSFVRLDTTETNIVNSVLQTGDGKKTLRLPKMLETEIVVKILYRPNIPLKIVRFFRNNMVTGVEIADRSVISVAD

SEQ ID NO: 352 - protein, 537 aa, Epstein-Barr virus
MSGQQRGSVILVPEHLAGALTKLMSDFITGQDVTLSGGNIAVKIRDAINQTPGGGDVAILSSLFALWNALPTSGRQSSRDDLIPAAVQALTTAHNLCLGVIPGETSHKDTPESLLRAIVTGLQKLWVDSCGCPECLQCLKGLKAIKPGLYEIPRIIPHTKQCSPVNLLNMLVHKLVALRGHVQLAYDARVLTPDFHEIPDLDDSDAVFARTLLAALFHLNMFFILKDYITQDSMSLKQALSGHWMSATGNPLPAAPETLRDYLEAFRNSDNHFYLPTTGPLNTFKFPEELLGRVVVIDSSLCAASHVQDVITRGVGAGVPRPQFLALPPAPSRKPQQTCSQLTSRGNESSRRNLGQPGGTSPAVPPVCPIVSLTASGAKQNRGGMGSLHLAKPEETSPAVSPVCPIASPAASRSKQHCGVTGSSQAAPSSSSVAPVASLSGDLEEEEEGSRESPSLPSSKKGADEFEAWLEAQDANFEDVQREFSGLRVIGDEDEDGSEDGEFSDLDLSDSDHEGDEGGGAVGGGRSLHSLYSLSVI

SEQ ID NO: 353 - protein, 710 aa, Vaccinia virus
MRYIVSPQLVLQVGKGQEVERALYLTPYDYIDEKSPIYYFLRSHLNIQQPEIVKRHILLTLRMTQLKGYLGNLLDIKDDIIIYSHKNNLEYSYVDNTIFNPFVYTQKKTLLKNDSFLYNVYPGACDFLVIWVARACDTSIPEFGSYEDVDNNIIKFETMLMEVFPQLDLDITVESKFNNIFRTNLKLTGLKKIIQRVQDLDINYKSLLSRYDEHFINMTGNHFILNDEQLNLSIWDLDGTLALSSDGDTVMINNVKLFTDLVSDIDTQMERIKGDITYKVHLATPINSRIKLDIETSFIFIETATNNILLSSDKKISIILAKNHISIKVKNHIPNIEKYFTFLVIAINAMFNSVQKSADFTKVETVYWSRICQNTKNKNRKPIIINYLDPGMKKISNNFYRSDEKEVFINDNGIMFTCMDPLGKYNKVGFLNIFHDMRKYCIPCCFLHDQSHRSTFSSCVHQIDVEKKIVSPYILNFGKVVTESKMSFLPIIFDAFLNDGMTANMEQDNKRLKETSGYHIVRCCAGDDIVRLRTTSDIIQFVNEDKNILIVNDMVYFPMNASDIGKKIHILIQEIVHEVMIVKKKESSDKIDFFPPNYKLLKDLFPKQTIQTPIQSDAGMVLTTDGFYIDGKLFNEDLSSKYVTFTKNVIASDAVAKYFSPLFKYVISEAKDRFIKTWMINIMIHMNVDPNNIIPTLEKYYPNSGRAQIN

SEQ ID NO: 354 - protein, 261 aa, Human cytomegalovirus
MDPPLPSLHSPQWASLLQLHHGLMWLRRFAVLVRVYALVVFHIAISTAFCGMIWLGIPDSHNICQHESSPLLLVFAPSLLWCLVLIQGERHPDDVVLTMGYVGLLSVTTVFYTWCSDLPAILIDYTLVLTLWIACTGAVMVGDSFRAKRWELICSRVLTSVFFITLWVIGDQTVFHHQRILLYGYGAIVFLMMTVTFYGTRYIRDELPAAQTLRGSLLIYVGLVTMFKITLIVLSPNLWRLPWTTVFAAFRSSYCEGGGGS

SEQ ID NO: 355 - protein, 919 aa, Human adenovirus
MATPSMMPQWSYMHIAGQDASEYLSPGLVQFARATDTYFTLGNKFRNPTVAPTHDVTTDRSQRLTLRFVPVDREDTAYSYKARFTLAVGDNRVLDMASSYFDIRGVLDRGPSFKPYSGTAYNSLAPKGAPNASQWLTTNDNKSHTFAQAPYIGSSITKDGIQVGTNTANPPQPVYADKTYQPEPQVGESQWNAPLPNNAKAAGRVLKNTTPMYPCYGSYARATNENGGQSKNNEGVEMQFFASAADNQNDPSVVLYSEDVNLEAPDTHIVFKPAVAADTVSSELLLGQQAAPNRPNYIGFRDNFIGLMYYNSTGNMGVLAGQASQLNAVVDLQDRNTELSYQLMLDALGDRSRYFSMWNSAVDSYDPDVRIIENHGVEDELPNYCFPLGAVGIVNSYKGVKYDANAWAKDNNKADNNNLATGNIFAMEINLQANLWRSFLYSNVGLYLPDSLKYTPGNIKLPDNKNTYEYMNGRVTAPGLVDTYVNIGARWSPDVMDNINPFNHHRNAGLRYRSMLLGNGRFVPFHIQVPQKFFAIRNLLLLPGSYTYEWNFRKDVNMILQSTLGNDLRVDGASIRFDNIALYANFFPMAHNTASTLEAMLRNDTNDQSFNDYLCAANMLYPIPANATSVPISIPSRNWAAFRGWSFTRLKTKETPSLGSGFDPYFVYSGTIPYLDGTFYLNHTFKKVSIMFDSSVSWPGNDRLLTPNEFEIKRSVDGEGYNVAQCNMTKDWFLIQMLSHYNIGYQGFYVPEGYKDRMYSFFRNFQPMSRQVVDTTEYKDYKQVTVKFQHNNSGFVGYLGPTMREGQAYPANYPYPLIGKTAVESITQKKFLCDRVMWRIPFSSNFMSMGALTDLGQNMLYANSAHALDMTFEVDPMDEPTLLYVLFEVFDVVRIHQPHRGVIEAVYLRTPFSAGNATT

SEQ ID NO: 356 - protein, 318 aa, Vaccinia virus
MTTVPVTDIQNDLITEFSEDNYPSNKNYEITLRQMSILTHVNNVVDREHNAAVVSSPEEISSQLNEDLFPDDDSPATIIERVQPHTTIIDDTPPPTFRRELLISEQRQQREKRFNITVSKNAEAIMESRSMISSMPTQTPSLGVVYDKDKRIQMLEDEVVNLRNQRSNTKSSDNLDNFTRILFGKTPYKSTEVNKRIAIVNYANLNGSPLSVEDLDVCSEDEIDRIYKTIKQYHESRKRKIIVTNVIIIVINIIEQALLKLGFEEIKGLSTDITSEIIDVEIGDDCDAVASKLGIGNSPVLNIVLFILKIFVKRIKII

SEQ ID NO: 357 - protein, 476 aa, Human cytomegalovirus
MDDLRDTLMAYGCIAIRAGDFNGLNDFLEQECGTRLHVAWPERCFIQLRSRSALGPFVGKMGTVCSQGAYVCCQEYLHPFGFVEGPGFMRYQLIVLIGQRGGIYCYDDLRDCIYELAPTMKDFLRHGFRHCDHFHTMRDYQRPMVQYDDYWNAVMLYRGDVESLSAEVTKRGYASYSIDDPFDECPDTHFAFWTHNTEVMKFKETSFSVVRAGGSIQTMELMIRTVPRITCYHQLLGALGHEVPERKEFLVRQYVLVDTFGVVYGYDPAMDAVYRLAEDVVMFTCVMGKKGHRNHRFSGRREAIVRLEKTPTCQHPKKTPDPMIMFDEDDDDELSLPRNVMTHEEAESRLYDAITENLMHCVKLVTTDSPLATHLWPQELQALCDSPALSLCTDDVEGVRQKLRARTGSLHHFELSYRFHDEDPETYMGFLWDIPSCDRCVRRRRFKVCDVGRRHIIPGAANGMPPLTPPHAYMNN

SEQ ID NO: 358 - protein, 349 aa, Variola virus
MNTRTDVTNDNIDKNPTKRGNKNIPGRNERFNDRNRFNNDGNNRPRLQPSPPPRQDNKCREENGDFINIRLCAYEKEYCNDGYLSPAYYMLKQVDDEEMSCWSELSSLVRSKKAVGFPLLKAAKRISHGSMLYFEQFKNSKVVRLTPQVKCLNDTVIFQTVVILYSMYKRDIYSNEFCFDLVSIPRTNIVFSVNQLMFNICTDILVVLSICGNRLYRTNLPQSCYLNFIHGHETIACRGYEHSNYFFEWLIKNHLSLLTKQTMDILKVKKKYATGAPVNRLLEPGTLVYVPKEDYYFIGISLTDVSISDNVRVLFSTDGIVLEIEDFNIKHLFMAGEMFVRSQSSTIIV

SEQ ID NO: 359 - protein, 82 aa, Vaccinia virus
MALLEATGFSNINDFNIFSYMKSKNVDVDLIKVLVEHGFDLSVKCENHRSVIENYVMTDDPVPEIIDLFIENGCSVLYEDEY

SEQ ID NO: 360 - protein, 245 aa, Epstein-Barr virus
MMDPNSTSEDVKFTPDPYQVPFVQAFDQATRVYQDLGGPSQAPLPCVLWPVLPEPLPQGQLTAYHVSAAPTGSWFPAPQPAPENAYQAYAAPQLFPVSDITQNQQTNQAGGEAPQPGDNSTVQPAAAVVFACPGANQGQQLADIGAPQPAPAAAPARRTRKPLQPESLEECDSELDIKRYKNRVASRKCRAKFKHLLQHYREVASAKSSENDRLRLLLKQMCPSLDVDSIIPRTPDVLHEDLLNF

SEQ ID NO: 361 - protein, 42 aa, Vaccinia virus
MLKMSAVDFLERLIKAGVYIYVLRTKCVIAALLVKNYSIKDE

SEQ ID NO: 362 - protein, 293 aa, Human cytomegalovirus
MSPNSEATGTAWAPPPPRPSRGVIMISSVSTNDVRRFLLCMRVYSTVAVQGTCTFLLCLGLVLAFPHLKGTVFLCCTGFMPPLSLMVPTICLALLHGKRDEGSFTSPPSPGLLTIYSVLTTLSVIVASACSSSTLVTFSGLLACVLFSLCSCVTGLAGHNHRRWQVIVTLFVIGVIAFLIALYLQPVPLGHKLFLGYYAMALSFMLVVTVFDTTRLFEIAWSEADLLTLCLYENLVYLYLLILILFTTEDSLDKLIAWMTWLSSRATGATNAASISGCDLLREVQRNLTRTMA

SEQ ID NO: 363 - protein, 143 aa, Human herpesvirus
MESSNINALQQPSSIAHHPSKQCASSLNETVKDSPPAIYEDRLEHTPVQLPRDGTPRDVCSVGQLTCRACATKPFRLNRDSQYDYLNTCPGGRHISLALEIITGRWVCIPRVFPDTPEEKWMAPYIIPDREQPSSGDEDSDTD

SEQ ID NO: 364 - protein, 94 aa, Vaccinia virus
MFVDDNSLIIYSTWPSTLSDSSGRVIVMPDNRSFTFKEGFKLDESIKSILLVNPSSIDLLKIRVYKHRIKWMGDIFVLFEQENIPPPFRLVNDK

SEQ ID NO: 365 - protein, 507 aa, Human papillomavirus
MYRLRRKRAAPKDIYPSCKISNTCPPDIQNKIEHTTIADKILQYGSLGVFLGGLGIGTARGSGGRIGYTPLGEGGGVRVATRPTPVRPTIPVETVGPSEIFPIDVVDPTGPAVIPLQDLGRDFPIPTVQVIAEIHPISDIPNIVASSTNEGESAILDVLRGNATIRTVSRTQYNNPSFTVASTSNISAGEASTSDIVFVSNGSGDRVVGEDIPLVELNLGLETDTSSVVQETAFSSSTPIAERPSFRPSRFYNRRLYEQVQVQDPRFVEQPQSMVTFDNPAFEPELDEVSIIFQRDLDALAQTPVPEFRDVVYLSKPTFSREPGGRLRVSRLGKSSTIRTRLGTAIGARTHFFYDLSSIAPEDSIELLPLGEHSQTTVISSNLGDTAFIQGETAEDDLEVISLETPQLYSEEELLDTNESVGENLQLTITNSEGEVSILDLTQSRVRPPFGTEDTSLHVYYPNSSKGTPIINPEESFTPLVIIALNNSTGDFELHPSLRKRRKRAYV

SEQ ID NO: 366 - protein, 145 aa, Human adenovirus
MRADREELDLPPPVGGVAVDVVKVEVPATGRTLVLAFVKTCAVLAAVHGLYILHEVDLTTAHKEAEWEFEPLAWRVWLVVFYFGCLSLTVWLLEGSYGGSDHHAARAQSPDVRARRSELDDNIAQMGAVHGLELPRRQVLRHRGT

SEQ ID NO: 367 - protein, 76 aa, Cowpox virus
MSWYEKYNIVLNPPKRCSSACADNLTTMLAEDGNNIRAILYSQPQKLKVLQDFLATSRNKMFLYKILDDEIRRVLT

SEQ ID NO: 368 - protein, 150 aa, Vaccinia virus
MGIQHEFDIIINGDIALRNLQLHKGDNYGCKLKIISNDYKKLKFRFIIRPDWSEIDEVKGLTVFANNYAVKVNKVDDTFYYVIYEAVIHLYNKKTEILIYSDDENELFKHYYPYISLNMISKKYKVKEENYSSPYIEHPLIPYRDYESMD

SEQ ID NO: 369 - protein, 297 aa, Vaccinia virus
MVNDKILYDSCKTFNIDASSAQSLIESGANPLYEYDGETPLKAYVTKKNNNIKNDVVILLLSSVDYKNINDFDIFEYLCSDNIDIDLLKLLISKGIEINSIKNGINIVEKYATTSNPNVDVFKLLLDKGIPTCSNIQYGYKIKIEQIRRAGEYYNWDDELDDYDYDYTTDYDDRMGKTVLYYYIITRSQDGYATSLDVINYLISHEKEMRYYTYREHTTLYYYLDKCDIKREIFDALFDSNYSGHELMNILSNYLRKQFRKKNHKIDNYIVDQLLFDRDTFYILELCNSLRNNIHNS

SEQ ID NO: 370 - protein, 293 aa, Human cytomegalovirus; identical to SEQ ID NO: 362

SEQ ID NO: 371 - protein, 302 aa, Human herpesvirus
MASSDGDRLCRSNAVRRKTTPSYSGQYRTARRSVVVGPPDDSDDSLGYITTVGADSPSPVYADLYFEHKNTTPRVHQPNDSSGSEDDFEDIDEVVAAFREARLRHELVEDAVYENPLSVEKPSRSFTKNAAVKPKLEDSPKRAPPGAGAIASGRPISFSTAPKTATSSWCGPTPSYNKRVFCEAVRRVAAMQAQKAAEAAWNSNPPRNNAELDRLLTGAVIRITVHEGLNLIQAANEADLGEGASVSKRGHNRKTGDLQGGMGNEPMYAQVRKPKSRTDTQTTGRITNRSRARSASRTDTRK

SEQ ID NO: 372 - protein, 270 aa, Vaccinia virus
MNCFQEKQFSRENLLKMPFRMVLTGGSGSGKTIYLLSLFSTLVKKYKHIFLFTPVYNPDYDGYIWPNHINFVSSQESLEYNLIRTKSNIEKCIAVAQNHKKSAHFLLIFDDVGDKLSKCNTLIEFLNFGRHLNTSIILLCQTYRHVPILGRANITHFCSFNISISDAENMLRSMPVKGKRKDILNMLNMIQTARSNNRLAIIIEDSVFCEGELRICTDTADKDVIEQKLNIDILVNQYSHMKKNLNAILESKKTKLCNSDQSSSSKNVSS

SEQ ID NO: 373 - protein, 539 aa, Human papillomavirus
MAHNIIYGHGIIIFLKNVNVFPIFLQMALWRPSDSTVYLPPPSVARVVSTDDYVSRTSIFYHAGSSRLLTVGNPYFRVVPNGAGNKQAVPKVSAYQYRVFRVALPDPNKFGLPDSTIYNPETQRLVWACVGMEIGRGQPLGIGLSGHPFYNKLDDTESAHAATAVITQDVRDNVSVDYKQTQLCILGCVPAIGEHWAKGTLCKPAQLQPGDCPPLELKNTIIEDGDMVDTGYGAMDFSTLQDTKCEVPLDICQSICKYPDYLQMSADPYGDSMFFCLRREQLFARHFWNRAGVMGDTVPTDLYIKGTSANMRETPGSCVYSPSPSGSIITSDSQLFNKPYWLHKAQGHNNGICWHNQLFVTVVDTTRSTNLTLCASTQNPVPSTYDPTKFKQYSRHVEEYDLQFIFQLCTITLTAEVMSYIHSMNSSILENWNFGVPPPPTTSLVDTYRFVQSVAVTCQKDTTPPEKQDPYDKLKFWTVDLKEKFSSDLDQYPLGRKFLVQAGLRRRPTIGPRKRPAASTSTASTASRPAKRVRIRSKK

SEQ ID NO: 374 - protein, 607 aa, Epstein-Barr virus
MAGFPGKEAGPPGGWRKCQEDESPENERHENFYAEIDDFAPSVLTPTGSDSGAGEEDDDGLYQVPTHWPPLMAPTGLSGERVPCRTQAAVTSNTGNSPGSRHTSCPFTLPRGAQPPAPAHQKPTAPTPKPRSRECGPSKTPDPFSWFRKTSCTEGGADSTSRSFMYQKGFEEGLAGLGLDDKSDCESEDESNFRRPSSHSALKQKNGGKGKPSGLFEHLAAHGREFSKLSKHAAQLKRLSGSVMNVLNLDDAQDTRQAKAQRKESTRVPIVTHLTNHVPVIKPACSLFLEGAPGVGKTTMLNHLKAVFGDLTIVVPEPMRYWTHVYENAIKAMHKNVTRARHGREDTSAEVLACQMKFTTPFRVLASRKRSLLVTESGARSVAPLDCWILHDRHLLSASVVFPLMLLRSQLLSYSDFIQVLATFTADPGDTIVWMKLNVEENMRRLKKRGRKHESGLDAGYLKSVNDAYHAVYCAWLLTQYFAPEDIVKVCAGLTTITTVCHQSHTPIIRSGVAEKLYKNSIFSVLKEVIQPFRADAVLLEVCLAFTRTLAYLQFVLVDLSEFQDDLPGCWTEIYMQALKNPAIRSQFFDWAGLSKVISDFERGNRD

SEQ ID NO: 375 - protein, 508 aa, Human papillomavirus
MALWRSSDNKVYLPPPSVAKVVSTDEYVTRTSIFYHAGSSRLLTVGHPYFKVPKGGNGRQDVPKVSAYQYRVFRVKLPDPNKFGLPDNTVYDPNSQRLVWACVGVEIGRGQPLGVGLSGHPLYNKLDDTENSHVASAVDTKDTRDNVSVDYKQTQLCIIGCVPAIGEHWTKGTACKPTTVVQGDCPPLELINTPIEDGDMVDTGYGAMDFKLLQDNKSEVPLDICQSICKYPDYLQMSADAYGDSMFFCLRREQVFARHFWNRSGTMGDQLPESLYIKGTDIRANPGSYLYSPSPSGSVVTSDSQLFNKPYWLHKAQGLNNGICWHNQLFLTVVDTTRSTNLSVCASTTSSIPNVYTPTSFKEYARHVEEFDLQFIFQLCKITLTTEVMSYIHNMNTTILEDWNFGVTPPPTASLVDTYRFVQSAAVTCQKDTAPPVKQDPYDKLKFWPVDLKERFSADLDQFPLGRKFLLQLGARPKPTIGPRKRAAPAPTSTPSPKRVKRRKSSRK

SEQ ID NO: 376 - protein, 184 aa, Vaccinia virus
MSSIRFIACLYLISIFGNCHEDPYYQPFDKLNITLDIYTYEDLVPYTVDNDLPNPNDDTTSFVKIYFKNFWITVMTKWCAPFIDTVSVYTSHDNLNIQFYSRDEYDTQSEDKICTIDVKARCKHLTKREVTVQKEAYRYSLSSDLSCFDSIDLDIDLIETNSTDTTVLKSYELMLPKRAKSIHN

SEQ ID NO: 377 - protein, 49 aa, Vaccinia virus
MVIGLVIFVSVAAAIVGVLSNVLDMFMYVEENNEEDARIKEEQELLLLY

SEQ ID NO: 378 - protein, 82 aa, Vaccinia virus
MSILGVSIECKKSSTLLTFLTVRKMTRVFNKFPDMAYYRGDCLKAVYVTMTYKNTKTGETDYTYLSNGGCLHTIVMGSMVDY

SEQ ID NO: 379 - protein, 102 aa, Human herpesvirus
MAGQNTMEGEAVALLMEAVVTPRAQPNNTTITAIQPSRSAEKCYYSDSENETADEFLRRIGKYQHKIYHRKKFCYITLIIVFVFAMTGAAFALGYITSQFVG

SEQ ID NO: 380 - protein, 426 aa, Variola virus
MTSSADLTNLKELLSLYKSLRFSDSAAIEKYNSLVEWGTSTYWKIGVQKVANVETSISDYYDEVKNKPFNIDPGYYIFLPVYFGSVFIYSKGKNMVELGSGNSFQIPDDMRSVCNKVLDGDNGIDFLRFVLLNNRWIMEDAISKYQSPVNIFKLASEYGLNIPNYLEIEIEEDTLFDDELYSIIERSFDDNFPKISISYIKLGELRRQVVDFFKFSFMYIESIKVDRIGDNIFIPSVITKSGKKILVKDVDHLIRSKVREHTFVKVKKKNTFSILYDYDGNGTETRGEVIKRIIDTIGRDYYVNGKYFSKVGSAGLKQLTNKLNINECTTVDELVDEINKSGTVKRKIKTQSAFDLSRECLGYPEADFITLVNNMRFKIENCKVVNFNIENTNCLNNPSIETIYGNFNQFVSIFNIVTDVKKRLFE

SEQ ID NO: 381 - protein, 467 aa, Human papillomavirus
MVAVRASRRKRASATDLYKTCKAAGTCPPDVIPKIEGSTLADKILQWSGLGIFLGGLGIGTGTGTGGRTGYIPLGGGGRPSVVDIGPTRPPIIIEPVGPTEPSIVTLVEESSIIQSGSPFPNFSGGDGFEVTTSSTTTPAVLDITPSPGTVHVTSTNIQNPLYIEPPVDIPQSGEALGHIFTSTSTAGTHSYEEIPMEVFASNTSSGSKPISSTPIPGIRRVAAPRLYSKAYQQVKVTDPNFISKPSTFITFDNPAYEPMDTTLTFSADSHVAPDPDFLDIIALHRPALTSRRGTVRFSRLGQKATLKTRSGKQIGAKVHYYHDISPIHATEEAIELQPLITSEQHSTPLFDVYADADPAPTFTFPSTTPTTIPRFSSTIFSTTSSAPLNVTIPLSTSFDIPIYNGPDIYAPVPSSTWPYIPPPPTTMSHSVVAQGGNYYLWPYIYLIHKRRRKRVPCFFSDGLAAY

SEQ ID NO: 382 - protein, 607 aa, Epstein-Barr virus
MAGFPGKEAGPPGGWRKCQEDESPENERHENFYAEIDDFAPSVLTPTGSDSGAGEEDDDGLYQVPTHWPPLMAPTGLSGERVPCRTQAAVTSNTGNSPGSRHTSCPFTLPRGAQPPAPAHQKPTAPTPKPRSRECGPSKTPDPFSWFRKTSCTEGGADSTSRSFMYQKGFEEGLAGLGLDDKSDCESEDESNFRRPSSHSALKQKNGGKGKPSGLFEHLAAHGREFSKLSKHAAQLKRLSGSVMNVLNLDDAQDTRQAKAQRKESMRVPIVTHLTNHVPVIKPACSLFLEGAPGVGKTTMLNHLKAVFGDLTIVVPEPMRYWTHVYENAIKAMHKNVTRARHGREDTSAEVLACQMKFTTPFRVLASRKRSLLVTESGARSVAPLDCWILHDRHLLSASVVFPLMLLRSQLLSYSDFIQVLATFTADPGDTIVWMKLNVEENMRRLKKRGRKHESGLDAGYLKSVNDAYHAVYCAWLLTQYFAPEDIVKVCAGLTTITTVCHQSHTPIIRSGVAEKLYKNSIFSVLKEVIQPFRADAVLLEVCLAFTRTLAYLQFVLVDLSEFQDDLPGCWTEIYMQALKNPAIRSQFFDWAGLSKVISDFERGNRD

SEQ ID NO: 383 - protein, 251 aa, Cowpox virus
MSLLLENLIEEDTIFFAGSISEYDDLQMVIAGAKSKFPRSMLSIFNIVPRTMSKYELELIHNENITGAMFTTMYNIRNNLGLGDDKLTIEAIENYFLDPNNEVMPLIINNTDMTAVIPKKSGRRKNKNMVIFRQGSSPILCIFETRKKINIYKENMESASTEYTPIGDNKALISKYAGINILNVYSPSTSMRLNAIYGFTNKNKLEKLSTNKELESYSSSPLQEPIRLNDFLGLLECVKKNIPLTDIPTKD

SEQ ID NO: 384 - protein, 250 aa, Human adenovirus
MEDINFASLAPRHGSRPFMGNWQDIGTSNMSGGAFSWGSLWSGIKNFGSTVKNYGSKAWNSSTGQMLRDKLKEQNFQQKVVDGLASGISGVVDLANQAVQNKINSKLDPRPPVEEPPPAVETVSPEGRGEKRPRPDREETLVTQIDEPPSYEEALKQGLPTTRPIAPMATGVLGQHTPVTLDLPPPADTQQKPVLPGPTAVVVTRPSRASLRRAASGPRSLRPVASGNWQSTLNSIVGLGVQSLKRRRCF

SEQ ID NO: 385 - protein, 284 aa, Vaccinia virus
MDLSRINTWKSKQLKSFLSSKDTFKADVHGHSALYYAIADNNVRLVCTLLNAGALKNLLENEFPLHQAATLEDTKIVKILLFSGLDDSQFDDKGNTALYYAVDSGNMQTVKLFVKKNWRLMFYGKTGWKTSFYHAVMLNDVSIVSYFLSEIPSTFDLAILLSCIHITIKNGHVDMMILLLDYMAFTNTNNSLLFIPDIKLAIDNKDIEMLQALFKYDINIYSANLENVLLDDAEIAKMIIEKHVEYKSDSYTKDLDIVKNNKLDEIISKNKELKLMYVNCVKKN

SEQ ID NO: 386 - protein, 91 aa, Vaccinia virus
MSLESFIITTFNNNSSTNIDNMCHLYVKVCPSSLLFRLFVECCDINKLVEGTTPLHCYLMNEGFESSVLKNLLKEYVMNTFNVHDIHYTNI

SEQ ID NO: 387 - protein, 769 aa, Human herpesvirus
MAEITSLFNNSSGSEEKRIASSVSIDQGLNGSNPNDQYKNMFDIYWNEYAPDIGFCTFPEEDGWMLIHPTTQSMLFRKILAGDFGYTDGQGIYSAVRSTETVIRQVQATVLMNALDATRYEDLAADWEHHIQQCNLHAGALAERYGLCGESEAVRLAHQVFETWRQTLQSSLLEFLRGITGCLYTSGLNGRVGFAKYVDWIACVGIVPVVRKVRSEQNGTPAPLNTYMGQAAELSQMLKVADATLARGAAVVTSLVECMQNVAIMDYDRTRLYYNYNRRLIMAKDDVTGMKGECLVVWPPVVCGEGVVFDSPLQRLSGEVLACYALREHARVCQVLNTAPLRVLIGRRNEDDRSHSTRAVDRIMGENDTTRAGSAASRLVKLIVNLKNMRHVGDITETVRSYLEETGNHILEGSGSVDTSQPGFGKANQSFNGGAMSGTTNVQSAFKTSVVNSINGMLEGYVNNLFKTIEGLKDVNSDLTERLQFKEGELKRLREERVKIKPSKGSHITMAEETRIADLNHEVIDLTGIIGDDAYIANSFQSRYIPPYGDDIKRLSELWKQELVRCFKLHRVNNNQGQEISVSYSNASISLLVAPYFSFILRATRLGFLVTQSEVHRSEEELCQAIFKKARTESYLSQIRILYEMQVRAEVIKRGPRRTPSPSWGLPDPTEDDERIPEPNKINNQYMHVGYKNLSHFMKGHPPERLRVHKVNAADSTLLDKIRANRRRGDGRWDVRNKYTQHFRLQRNDRQLTNTSRRGVGCERRDRRS

SEQ ID NO: 388 - protein, 168 aa, Vaccinia virus
MKSLNRQTVSMFKKLSVPAAIMMILSTIISGIGTFLHYKEELMPSACANGWIQYDKHCYLDTNIKMSTDNAVYQCRKLRARLPRPDTRHLRVLFSIFYKDYWVSLKKTNNKWLDINNDKDIDISKLTNFKQLNSTTDAEACYIYKSGKLVKTVCKSTQSVLCVKKFYK

SEQ ID NO: 389 - protein, 523 aa, Human papillomavirus
MVRAKRTKRDSATNIYRTCKQAGTCPPDVINKVEQSTIADNILKYGSAGVFFGGLGISTGRGTGGTTGYVPLGEGTGVRVGSTPTVVRPALVPEVIGPADLLPVDTIAPVDPASSSIVPLTESSGVDLLPGEIETIAEVHPIPDVPTFDTPVVTTSKGSSAILEVAPEPTPPTRVRVSRTQYHNPAFHIITESTPSQGESSLSDEIIVASGAGGQSVGVSENIELQDLSNRYSFEIETPTPPRRSSTPLQRATQAFRQRSLTNRRLLQQVPVEDPLFLTQPSKLVRFAFENPAFEEEVTQVFEQDLAGFVEPPNRDFLDIAELGRPRFSETREGYVRLSRLGRRATIRTRAGTQIGAQVHFYKDLSSINTEAPIELDLLGQHSGDATIVHGTVESTFIDTNIEENPLAEQMELEIDTYPEAHSFDALLDEATDDFSGSQLVIGNRRSTTSYTVPRFESPRNSSYYVQDLQGYYVAYPESRDKIELIYPSPTLPAVVIHTEDSSGDFYLHPSLLQRRRRKRKYL

SEQ ID NO: 390 - protein, 87 aa, Vaccinia virus
MEVIADRLDDIVKQNIADEKFVDFVIHGLEHQCPAILRPLIRLFIDILLFVIVIYIFTVRLVSRNYQMLLALVALVITLTIFYYFIL

SEQ ID NO: 391 - protein, 240 aa, Vaccinia virus
MAFDISVNASKTINALVYFSTQQNKLVIRNEVNDTHYTVEFDRDKVVDTFISYNRHNDSIEIRGVLPEETNIGCAVNTPVSMTYLYNKYSFKLILAEYIRHRNTISGNIYSALMTLDDLAIKQYGDIDLLFNEKLKVDSDSGLFDFVNFVKDMICCDSRIVVALSSLVSKHWELTNKKYRCMALAEHISDSIPISELSRLRYNLCKYLRGHTESIEDEFDYFEDDDSSTCSAVTDRETDV

SEQ ID NO: 392 - protein, 660 aa, Hepatitis E virus
MRPRPILLLLLMFLPMLPAPPPGQPSGRRRGRRSGGSGGGFWGDRADSQPFAIPYIHPTNPFAPDVTAAAGAGPRVRQPARPLGSAWRDQAQRPAAASRRRPTTAGAAPLTAVAPAHDTPPVPDVDSRGAILRRQYNLSTSPLTSSVATGTNLVLYAAPLSPLLPLQDGTNTHIMATEASNYAQYRVVRATIRYRPLVPNAVGGYAISISFWPQTTTTPTSVDMNSITSTDVRILVQPGIASEHVIPSERLHYRNQGWRSVETSGVAEEEATSGLVMLCIHGSLVNSYTNTPYTGALGLLDFALELEFRNLTPGNTNTRVSRYSSTARHRLRRGADGTAELTTTAATRFMKDLYFTSTNGVGEIGRGIALTLFNLADTLLGGLPTELISSAGGQLFYSRPVVSANGEPTVKLYTSVENAQQDKGIAIPHDIDLGESRVVIQDYDNQHEQDRPTPSPAPSRPFSVLRANDVLWLSLTAAEYDQSTYGSSTGPVYVSDSVTLVNVATGAQAVARSLDWTKVTLDGRPLSTTQQYSKTFFVLPLRGKLSFWEAGTTKAGYPYNYNTTASDQLLVENAAGHRVAISTYTTSLGAGPVSISAVAVLAPHSALALLEDTMDYPARAHTFDDFCPECRPLGLQGCAFQSTVAELQRLKMKVGKTREL

SEQ ID NO: 393 - protein, 204 aa, Vaccinia virus
MAYMNRSDLDKLKHENIFSGNIIEDAKEFVFGSRKIYTDSVDDLIELYSLAKYLNNENLKDVVIERMDYVCKYIGKDNWSTIYSFYKENGLRNSFLRQYINNNIEEICNTDQFLKLDVDSVCDILDNDEIVVTREYTILNMVLRWLENKRVNIDDFTKVMFVIRFKFITYSELTNAIEKIAPEYRQCLQDLYHMKITRPRHFDN

SEQ ID NO: 394 - protein, 181 aa, Vaccinia virus
MISLSFLIHNPLKKWKLKPSISINGYRSTFTMAFPCAQFRPCHCHATKDSLNTVADVRHCLTEYILWVSHRWTHRESAGSLYRLLISFRTDATELFGGELKDSLPWDNIDNCVEIIKCFIRNDSMKTAEELRAIIGLCTQSAIVSGRVFNDKYIDILLMLRKILNENDYLTLLDHIRTAKY

SEQ ID NO: 395 - protein, 1083 aa, Human herpesvirus
MDKSSKPTIRLLFATKGCAISHSLLLLTGQISTEPLYVVSYTWTPDLDDVFVKNGREEITQVIPTKRPREVTENDEENQIMHLFCSRDVNVIFYLIGGFSTGDVRSRVWPIFFCCFKTQTDFKALYKALWYGAPLNPHIISDTLCISETFDIHSEVIQTLMVTTHHLNRKGLSDNGLCITEATLCKLVKKSVGRQELTSLYAHYERQVLAAYRRLYWGYGCSPFWYIVRFGPSEKTLVLATRYYLLQTDTSYNTLETPLYDLQAIKDLFLTYQVPALPNCSGYNISDLLSFDKLSMFCCSSTYTRGLTAKNALSYILQRIHTDTTEIHAVSEYITNDRKGLKVPDREFVDYIYLAHFECFNRKQIADHLQAVTYSDFVNKPVLLKSSNLGKRATANFFNHVRSRLNMRDYIKKNVICDVTELGPEIGHKYTITKTYTLSLTYAAKPSKFIGVCDLATTLTRRVENIEKQFSPYGWSSTIPSNPPGFDELSNFEDSGVSAEALRAANFANDTPNQSGRTGFDTSPGITKLLLFFSAATGIATHDVSILSYKTPLEALIGHSEVTGPMPVYRVALPHGAQAFAVIANDTWSSITNRYTLPHEARLIAEDLKQINPCNFVAASLRDMQLTLLLSTSVKNVSKISSNIPKDQLYINRNELFNTNLIITNLILDVDFHIRKPIPLGILHAGMRAFRHGILTAMQLLFPKAVVNPNKDPCYFYKTACPEPTVEVLDDDNLLDITSHSDIDFYIENGELYTCVEENYTEDVWFFDTQTTSEVHTHADVSNNENLHETLPCNCKEKIGFRVCVPIPNPYALVGSSTLKGFAQILQQAVLLEREFVEYIGPYLRDFSFIDTGVYSHGHSLRLPFFSKVTTTGTAVGQLLPFYVVPEQCIDILAFVTSHRNPANFHFHSRPQSNVPVQFILHNLGGEYAEFFERKVARNKQIFSSPQISLTKALKERGVTCLDAFTLEAFVDSTILESIVEHIAVHFPGRDREYTLTSSKCIAIKRDWVLFQLICGTKGFTCLRYPHRGGRTAPRTFVSLRVDHHNRLCISLAQQCFATKCDSNRMHTIFTLEVPNYPNLTSS

SEQ ID NO: 396 - protein, 168 aa, Variola virus
MKSLNRQTVSRFKKLSVPAAIMMILSTIISGIGTFLHYKEELMPSACANGWIQYDKHCYLDTNIKMSTDNTVYQCRKLRARLPRPDTRHLRVLFSIFYKDYWVSLKKTNNKWLDINNDKDIDISKLTNFKQLNSTTDAEACYIYKSGKLVKTVCKSTQSVLCVKRFYK

SEQ ID NO: 397 - protein, 505 aa, Human papillomavirus
MSLWLPSEATVYLPPVPVSKVVSTDEYVARTNIYYHAGTSRLLAVGHPYFPIKKPNNNKILVPKVSGLQYRVFRIHLPDPNKFGFPDTSFYNPDTQRLVWACVGVEVGRGQPLGVGISGHPLLNKLDDTENASAYAANAGVDNRECISMDYKQTQLCLIGCKPPIGEHWGKGSPCTNVAVNPGDCPPLELINTVIQDGDMVDTGFGAMDFTTLQANKSEVPLDICTSICKYPDYIKMVSEPYGDSLFFYLRREQMFVRHLFNRAGAVGENVPDDLYIKGSGSTANLASSNYFPTPSGSMVTSDAQIFNKPYWLQRAQGHNNGICWGNQLFVTVVDTTRSTNMSLCAAISTSETTYKNTNFKEYLRHGEEYDLQFIFQLCKITLTADVMTYIHSMNSTILEDWNFGLQPPPGGTLEDTYRFVTSQAIACQKHTPPAPKEDPLKKYTFWEVNLKEKFSADLDQFPLGRKFLLQAGLKAKPKFTLGKRKATPTTSSTSTTAKRKKRKL

SEQ ID NO: 398 - protein, 87 aa, Variola virus
MEVIADRLDDIVKQNIADEKFVDFVIHGLEHQCPAILRPLIRLFIDILLFVIVIYIFTVRLVSRNYQMLLALLALVISLTIFYYFIL

SEQ ID NO: 399 - protein, 65 aa, Cowpox virus
MEGSKRKHDSRRPQQEQEQHRPRTPPSYEEIAKYGHSFNVKRFTNEEMCLKNDYPRIISYNPPPK

SEQ ID NO: 400 - protein, 968 aa, Human adenovirus
MATPSMMPQWSYMHISGQDASEYLSPGLVQFARATETYFSLNNKFRNPTVAPTHDVTTDRSQRLTLRFIPVDREDTAYSYKARFTLAVGDNRVLDMASTYFDIRGVLDRGPTFKPYSGTAYNALAPKGAPNSCEWEQTEDSGRAVAEDEEEEDEDEEEEEEEQNARDQATKKTHVYAQAPLSGETITKSGLQIGSDNAETQAKPVYADPSYQPEPQIGESQWNEADANAAGGRVLKKTTPMKPCYGSYARPTNPFGGQSVLVPDEKGVPLPKVDLQFFSNTTSLNDRQGNATKPKVVLYSEDVNMETPDTHLSYKPGKGDENSKAMLGQQSMPNRPNYIAFRDNFIGLMYYNSTGNMGVLAGQASQLNAVVDLQDRNTELSYQLLLDSIGDRTRYFSMWNQAVDSYDPDVRIIENHGTEDELPNYCFPLGGIGVTDTYQAIKANGNGSGDNGDTTWTKDETFATRNEIGVGNNFAMEINLNANLWRNFLYSNIALYLPDKLKYNPTNVEISDNPNTYDYMNKRVVAPGLVDCYINLGARWSLDYMDNVNPFNHHRNAGLRYRSMLLGNGRYVPFHIQVPQKFFAIKNLLLLPGSYTYEWNFRKDVNMVLQSSLGNDLRVDGASIKFDSICLYATFFPMAHNTASTLEAMLRNDTNDQSFNDYLSAANMLYPIPANATNVPISIPSRNWAAFRGWAFTRLKTKETPSLGSGYDPYYTYSGSIPYLDGTFYLNHTFKKVAITFDSSVSWPGNDRLLTPNEFEIKRSVDGEGYNVAQCNMTKDWFLVQMLANYNIGYQGFYIPESYKDRMYSFFRNFQPMSRQVVDDTKYKEYQQVGILHQHNNSGFVGYLAPTMREGQAYPANVPYPLIGKTAVDSITQKKFLCDRTLWRIPFSSNFMSMGALTDLGQNLLYANSAHALDMTFEVDPMDEPTLLYVLFEVFDVVRVHQPHRGVIETVYLRTPFSAGNATT

SEQ ID NO: 401 - protein, 64 aa, Vaccinia virus
MDSFSSLFMKLCCISTDKTGSKKSDRKNKNKIKIKDYMEHDYYKITIVPGSSSTSTSSWYYTHA

SEQ ID NO: 402 - protein, 396 aa, Human papillomavirus
MQPETQESLSTRFAAQQEIQLTLIEKESYDLKDHLAYWKAVRLENVIAYYARKEHITKLGLQPLPTLAVTEYKAKEAINIQLLIQSLLKSEFALERWTLAETSAETINSSPRNCFKKVPFIVNVWFDNDERNSFPYTCWDFIYYQDDQNKWHKTEGLVDHNGCYYVDLNGDFVYFTLFQPDAVKYGKTGLWTVRFKNKTISASVTSSSRNTNPSSESRVGLSTSSSSESPRRRPSISENSNTESPTSSTSRLRERRRREPRESGTTDTTPRRRGTKRKLGSDSAPTPSEVGSRSTTLARHGYSRLGRLQEEARDPPLVLFTGQQNNLKCWRNRCTTKYASLFLCFSSVWKWLGPNSDGGAAKVLVAFKSDAQRQVFLNTVHIPKGTTITLGRLDSL

SEQ ID NO: 403 - protein, 775 aa, Human herpesvirus
MEFKRIFNTVHDIINRLCQHGYKEYIIPPESTTPVELMEYISTIVSKLKAVTRQDERVYRCCGELIHCRINLRSVSMETWLTSPILCLTPRVRQAIEGRRDEIRRAILEPFLKDQYPALATLGLQSALKYEDFYLTKLEEGKLESLCQFFLRLAATVTTEIVNLPKIATLIPGINDGYTWTDVCRVFFTALACQKIVPATPVMMFLGRETGATASCYLMDPESITVGRAVRAITGDVGTVLQSRGGVGISLQSLNLIPTENQTKGLLAVLKLLDCMVMAINSDCERPTGVCVYIEPWHVDLQTVLATRGMLVRDEIFRCDNIFCCLWTPDLFFERYLSYLKGASNVQWTLFDNRADILRTLHGEAFTSTYLRLEREGLGVSSVPIQDIAFTIIRSAAVTGSPFLMFKDACNRNYHMNTQGNAITGSNLCTEIVQKADAHQHGVCNLASINLTTCLSKGPVSFNLNDLQLTARTTVIFLNGVLAAGNFPCKKSCKGVKNNRSLGIGIQGLHTTCLRLGFDLTSQPARRLNVQIAELMLYETMKTSMEMCKIGGLAPFKGFTESKYAKGWLHQDGFSTISYLDLPWCTLRDDICAYGLYNSQFLALMPTVSSAQVTECSEGFSPIYNNMFSKVTTSGELLRPNLDLMDELRDMYSCEEKRLEVINILEKNQWSVIRSFGCLSNSHPLLKYKTAFEYEQEDLVDMCAERAPFIDQSQSMTLFIEERPDGTIPASKIMNLLIRAYKAGLKTGMYYCKIRKATNSGLFAGGELTCTSCAL

SEQ ID NO: 404 - protein, 221 aa, Vaccinia virus
MMLVPLITVTVVAGTILVCYILYICRKKIRTVYNDNKIIMTKLKKIKSSNSSKSSKSTDSESDWEDHCSAMEQNNDVDNISRNEILDDDSFAGSLIWDNESNVMAPSTEHIYDSVAGSTLLINNDRNEQTIYQNTTVVINETETVEVLNEDTKQNPNYSSNPFVNYNKTSICSKSNPFITELNNKFSENNPFRRAHSDDYLNKQEQDHEHDDIESSVVSLV

SEQ ID NO: 405 - protein, 505 aa, Human papillomavirus
MALWRPGDGKVYLPPTPVSKVISTDRYVQRTNLFYYGGSSRLLTVGHPYCSLQLDGLQGKKNTIPKVSGYQYRVFRVQLPDPNKFALPDGTLYNPDTERMVWACRGIEVGRGQPLGVGTSGHPLYNRLDDTENTTLLVAESSDSRDNVSVDYKQTQLLIVGCKPPIGEHWTKGTACANPAPRPTDCPPLEFTNTTIQDGDMVETGYGAIDFAALQENKSEVPLDICTTICKYPDYLQMAAEPYGDCMFFCLRREQMFARHFFNRQGVMGEALPDSYYLKGANDKAAPGSYIYSPTPSGSMVSSDSQLFNKPYWLQRAQGHNNGICWFNELFVTVVDTTRSTNLTICTATSPPVSEYKATSFREYLRHTEEFDLQFIFQLCKIHLTPEIMAYLHNMNKALLDDWNFGVVPPPSTSLEDTYRFLQSRAITCQKGAAAPPPKEDRYAKLSFWTVDLRDKFSTDLDQFPLGRKFLLQAGPRSVSVSRKRAAPSSTPTSSPATKRKKRKQ

SEQ ID NO: 406 - protein, 376 aa, Human herpesvirus
MASHAGQQHAPAFGQAARASGPTDGRAASRPSHRQGASGARGDPELPTLLRVYIDGPHGVGKTTTSAQLMEALGPRDNIVYVPEPMTYWQVLGASETLTNIYNTQHRLDRGEISAGEAAVVMTSAQITMSTPYAATDAVLAPHIGGEAVGPQAPPPALTLVFDRHPIASLLCYPAARYLMGSMTPQAVLAFVALMPPTAPGTNLVLGVLPEAEHADRLARRQRPGERLDLAMLSAIRRVYDLLANTVRYLQRGGRWREDWGRLTGVAAATPRPDPEDGAGSLPRIEDTLFALFRVPELLAPNGDLYHIFAWVLDVLADRLLPMHLFVLDYDQSPVGCRDALLRLTAGMIPTRVTTAGSIAEIRDLARTFAREVGGV

SEQ ID NO: 407 - protein, 391 aa, Rotavirus B
MDLIETVNACVKLQKRVLGLAPNTNLNTAGQSVLNDYNALASRVNGKTYALLNQIAVYTPYTINAPIISLAVRISTDDYDDMRSGIESILDVLAAAIRTEGSRPTRVIERRVLEPNVKQLIDDLRLKSLISDLSIANLAAVDTAMIQPEVIETENPLYADIIEQVVHRPNIGMTGGNIRATLGRWSGNKGVVTCMSGMDSEHRFTVELKTRTCGIINIVYIPTSGTILIPMPAGRNREGDLIDVSAEMMADDFAIDFMDDDNIIQTETGVGVYSFPMCNRIRFRINPWNNQKDDDNLGTVHMVNWAQGTAPKQPAISFMFETRRTFTEGDYQHLSRCAPKAQYMMDTQFNDVSFTNRPAVDWNIQSLLTSNTQRVWCQKIAMLIASFAAKI

SEQ ID NO: 408 - protein, 571 aa, Human adenovirus
MQRAAMYEEGPPPSYESVVSAAPVAAALGSPFDAPLDPPFVPPRYLRPTGGRNSIRYSELAPLFDTTRVYLVDNKSTDVASLNYQNDHSNFLTTVIQNNDYSPGEASTQTINLDDRSHWGGDLKTILHTNMPNVNEFMFTNKFKARVMVSRSLTKDKQVELKYEWVEFTLPEGNYSETMTIDLMNNAIVEHYLKVGRQNGVLESDIGVKFDTRNFRLGFDPVTGLVMPGVYTNEAFHPDIILLPGCGVDFTHSRLSNLLGIRKRQPFQEGFRITYDDLEGGNIPALLDVDAYQASLKDDTEQGGDGAGGGNNSGSGAEENSNAAAAAMQPVEDMNDHAIRGDTFATRAEEKRAEAEAAAEAAAPAAQPEVEKPQKKPVIKPLTEDSKKRSYNLISNDSTFTQYRSWYLAYNYGDPQTGIRSWTLLCTPDVTCGSEQVYWSLPDMMQDPVTFRSTSQISNFPVVGAELLPVHSKSFYNDQAVYSQLIRQFTSLTHVFNRFPENQILARPPAPTITTVSENVPALTDHGTLPLRNSIGGVQRVTITDARRRTCPYVYKALGIVSPRVLSSRTF

SEQ ID NO: 409 - protein, 182 aa, Vaccinia virus
MYKKLITFLFVIGALASYSNNEYTPFNKLSVKLYIDGVDNIENSYTDDNNELVLNFKEYTISIITESCDVGFDSIDIDVINDYKIIDMYTIDSSTIQRRGHTCRISTKLSCHYDKYPYIHKYDGDERQYSITAEGKCYKGIKYEISMINDDTLLRKHTLKIGSTYIFDRHGHSNTYYSKYDF

SEQ ID NO: 410 - protein, 643 aa, Human papillomavirus
MEDSEGTDGTEEDGCRAGGWFHVEAIITHGQRQVSSDEDEDCTETGEDVDFIDNRVPGDGQEIPLQLYTQQIAQDDEATVQALKRKFVASPLSACSCIENDLSPRLDAISLNRKSEKAKRRLFETEPPDSGYGNTQMVVGTPEEVTGDENSEGGRPVEDKEEERQGGDGEADLTVQTPQSGTDAAGSVLTLLRSSNLKATLLSKFKELFGVGYYELVRQFKSSKTACADWVVCAFGVYYAVAEGIKQLIQPHTQYAHIQVLTCSWGMVVFMLLRYNCAKNRDTVSKNMSMLLNIPEKHMLIEPPKLRSTPAALYWYKTAMGNGSEVYGETPEWIVRQTLVGHSMEDEQFRLSVMVQFAYDHDIVEESVLAFEYAQLADVDANAAAFLNSNCQAKYVKDAVTMCRHYKRAERAQMSMSQWITFRGNKVLEEGDWKPIVKFLRHQGVEFVSFLAAFKLFLKGVPKKNCIVFYGPADTGKSYFCMSLLQFLGGAVISYANSSSHFWLQPLSDSKIGLLDDATPQCWSYIDTYLRNLLDGNPVSIDRKHKTLLQLKCPPLMITTNINPLEEDRWKYLRSRLTLFTFNNPFPFASPGEPLYPINNANWKCFFQRSWSRLDLNSPEEQDDNGNTSEPFRCVPGDVARTL

SEQ ID NO: 411 - protein, 301 aa, Human herpesvirus
MGDLSCWTKVPGFTLTGELQYLKQVDDILRYGVRKRDRTGIGTLSLFGMQARYNLRNEFPLLTTKRVFWRAVVEELLWFIRGSTDSKELAAKDIHIWDIYGSSKFLNRNGFHKRHTGDLGPIYGFQWRHFGAEYKDCQSNYLQQGIDQLQTVIDTIKTNPESRRMIISSWNPKDIPLMVLPPCHTLCQFYVANGELSCQVYQRSGDMGLGVPFNIAGYALLTYIVAHVTGLKTGDLIHTMGDAHIYLNHIDALKVQLARSPKPFPCLKIIRNVTDINDFKWDDFQLDGYNPHPPLKMEMAL

SEQ ID NO: 412 - protein, 194 aa, Vaccinia virus
MMMMKWIISILTMSIMPVLAYSSSIFRFHSEDVELCYGHLYFDRIYNVVNIKYNPHIPYRYNFINRTLTVDELDDNVFFTHGYFLKHKYGSLNPSLIVSLSGNLKYNDIQCSVNVSCLIKNLATSTSTILTSKHKTYSLHRSTCITIIGYDSIIWYKDINDKYNDIYDFTAICMLIASTLIVTIYVFKKIKMNS

SEQ ID NO: 413 - protein, 473 aa, Human papillomavirus
MVAHRARRRKRASATELYKTCKVAGTCPPDVIPKVEGTTLADRILQWGSLGVYLGGLGIGTGSGTGGRTGYVPVGTRPGTVVDVSIPTRPPVVIEPVGPSDPSIVTLLEESSVINSGATIPTFTGTSGFEITSSATTTPAVLDITPAGDNVVITSTNFNNPLFTEPSLLEIPQTGETSGRVLVGTPTSGVHGYEEIPMDTFATSGTGLEPISSTPVPGVSRVAGPRLYGKALTQVRVSDPAFLTQPSSFVTFDNPVYDPEDETIIFERPSPGTRVPDPDFMDIVKLHRPALTSRRGTVRFSRVGQKFSMRTRSGTNIGARVHYYHDLSPILPTEDIELEPLLPPADPTAEESLYDIYADVDEADMAFTGGGRGATTYGGRITPSVFSSTLSTRYGNVTIPFVSPVDVPLHTGPDIILPSSAQWPFVPVAPADTTHYVYIDGGDYFLWPVTFPVSRKRRRKRLSYFLADGFVAL

SEQ ID NO: 414 - protein, 607 aa, Epstein-Barr virus
MAGFPGKEAGPPGGWRKCQEDESPENERHENFYAEIDDFAPSVLTPTGSDSGAGEEDDDGLYQVPTHWPPLMAPTGLSGERVPCRTQAAVTSNTGNSPGSRHTSCPFTLPRGAQPPAPAHQKPTAPTPKPRSRECGPSKTPDPFSWFRKTSCTEGGADSTSRSFMYQKGFEEGLAGLGLDDKSDCESEDESNFRRPSSHSALKQKNGGKGKPSGLFEHLAAHGREFSKLSKHAAQLKRLSGSVMNVLNLDDAQDTRQAKAQRKESTRVPIVIHLTNHVPVIKPACSLFLEGAPGVGKTTMLNHLKAVFGDLTIVVPEPMRYWTHVYENAIKAMHKNVTRARHGREDTSAEVLACQMKFTTPFRVLASRKRSLLVTESGARSVAPLDCWILHDRHLLSASVVFPLMLLRSQLLSYSDFIQVLATFTADPGDTIVWMKLNVEENMRRLKKRGRKHESGLDAGYLKSVNDAYHAVYCAWLLTQYFAPEDIVKVCAGLTTITTVCHQSHTPIIRSGVAEKLYKNSIYSVLKEVIQPYRADAVLLEVCLAFTRTLAYLQFVLVDLSEFQDDLPGCWTEIYMQALKNPAIRSQFFDWAGLSKVISDFERGNRD

SEQ ID NO: 415 - protein, 362 aa, Human adenovirus
MTKRLRVEDDFNPVYPYGYARNQNIPFLTPPFVSSNGFQNFPPGVLSLKLADPITINNQNVSLKVGGGLTLQEETGKLTVNTEPPLHLTNNKLGIALDAPFDVIDNKLTLLAGHGLSIITKETSTLPGLVNTLVVLTGKGIGTDLSNNGGNICVRVGEGGGLSFNDNGDLVAFNKKEDKRTLWTTPDTSPNCRIDQDKDSKLTLVLTKCGSQILANVSLIVVAGRYKIINNNTNPALKGFTIKLLFDKNGVLMESSNLGKSYWNFRNQNSIMSTAYEKAIGFMPNLVAYPKPTTGSKKYARDIVYGNIYLGGKPHQPVTIKTTFNQETGCEYSITFDFSWAKTYVNVEFETTSFTFSYIAQE

SEQ ID NO: 416 - protein, 60 aa, Epstein-Barr virus
MVHVLERALLEQQSSACGLPGSSTETRPSHPCPEDPDVSRLRLLLVVLCVLFGLLCLLLI

SEQ ID NO: 417 - protein, 125 aa, Vaccinia virus
MAVCIINHDNIRGVIYFEPVHGKDKVLGSVIGLKSGTYSLIIHRYGDISQGCDSIGSPEIFIGNIFVNRYGVAYVYLDTDVNISTIIGKALSISKNDQRLACGVIGISYINEKIIHFLTINENGV

SEQ ID NO: 418 - protein, 358 aa, Human papillomavirus
METLCHRLNVCQEKILDCYELDSDKLVDQINYWTLLRYEAAMFYAARERNLRTINHQVVPATTVSKQKACQAIEMHMALQSLNKSDYNMEPWTMRETCYELWCVAPKQCFKKGGITVTVIFDGNKDNAMDYTSWKFIYIYDNDKWVKTNGNVDYTGIYYTVNSKKEYYVQFKDEAKIYGAQQWEVYMYGTVITCPEYVSSTCSDALSTTTTVEQLSNTPTTNPLTTCVGAKEAQTQQRKRQRLTEPDSSTISPLSVDNTNNQIHCGSGSTNTGGHQSATQTAFIVHLKGDTNCLKCFRYRFTKHKGLYKNVSSTWHWTSNTKTGIVTIVFDSAHQRETFIKTIKVPPSVTLSLGIMTL

SEQ ID NO: 419 - protein, 605 aa, Human herpesvirus
MAAEADEENCEALYVAGYLALYSKDEGELNITPEIVRSALPPTSKIPINIDHRKDCVVGEVIAIIEDIRGPFFLGIVRCPQLHAVLFEAAHSNFFGNRDSVLSPLERALYLVTNYLPSVSLSSKRLSPNEIPDGNFFTHVALCVVGRRVGTVVNYDCTPESSIEPFRVLSMESKARLLSLVKDYAGLNKVWKVSEDKLAKVLLSTAVNNMLLRDRWDVVAKRRREAGIMGHVYLQASTGYGLARITNVNGVESKLPNAGVINATFHPGGPIYDLALGVGESNEDCEKTVPHLKVTQLCRNDSDMASVAGNASNISPQPPSGVPTGGEFVLIPTAYYSQLLTGQTKNPQVSIGAPNNGQYIVGPYGSPHPPAFPPNTGGYGCPPGHFGGPYGFPGYPPPNRLEMQMSAFMNALAAERGIDLQTPCVNFPDKTDVRRPGKRDFKSMDQRELDSFYSGESQMDGEFPSNIYFPGEPTYITHRRRRVSPSYWQRRHRVSNGQHEELAGVVAKLQQEVTELKSQNGTQMPLSHHTNIPEGTRDPRISILLKQLQSVSGLCSSQNTTSTPHTDTVGQDVNAVEASSKAPLIQGSTADDADMFANQMMVGRC

SEQ ID NO: 420 - protein, 68 aa, Variola virus
MDEMVLLTNILSVEVVNNNEMYHLIPHRLSMIILCISSIGRCVISIDNDVNNKNILTFPIDHAVIISH

SEQ ID NO: 421 - protein, 507 aa, Human papillomavirus
MAVWLPAQNKFYLPTQPITKILSSDDYVSRTNIFYHATSDRLLIVGHPLYEVTRANDNTMTVPKVSPNQYRVFRVRFPDPNRFAFGDKDIFDPETERLVWGLRGIEIGRGQPLGVGISGNPLLNRFDDAENPSRYNNTHATGDNRQNVAFDAKQTQMFLIGCTPATGEHWSIARRCAGTQFQLGDCPPIELVNTVIEDGDMFDIGLGAMDFGSLQANKADAPLDIAGTVCKYPDYIKMGQEVHGNSLFFFARREQMYLRHVFTHAGIVSEKEKVPTSAYIAAKAEQPQNTIATDNYFVAPSGSLVSSDVQIFNRPYWLQRSQGQNNGICWRNELFVTVADNTRGTTMNINVLNKATPETYDSADYNEYTRHVEEYELSFIVQLCKVKLTPENLAFLHNMDPTIIDSWQLTVSQPPANAIEDKYRFIESLATKCPDNVPPPTPTDPYKDLRFWDVDLSERMSEQLDQFPLGRKFLYQSGLAQRSVPKTVNFRKRRSSNTTVAKRRRRA

SEQ ID NO: 422 - protein, 341 aa, Varicella-zoster virus
MSTDKTDVKMGVLRIYLDGAYGIGKTTAAEEFLHHFAITPNRILLIGEPLSYWRNLAGEDAICGIYGTQTRRLNGDVSPEDAQRLTAHFQSLFCSPHAIMHAKISALMDTSTSDLVQVNKEPYKIMLSDRHPIASTICFPLSRYLVGDMSPAALPGLLFTLPAEPPGTNLVVCTVSLPSHLSRVSKRARPGETVNLPFVMVLRNVYIMLINTIIFLKTNNWHAGWNTLSFCNDVFKQKLQKSECIKLREVPGIEDTLFAVLKLPELCGEFGNILPLWAWGMETLSNCSRSMSPFVLSLEQTPQHAAQELKTLLPQMTPANMSSGAWNILKELVNAVQDNTS

SEQ ID NO: 423 - protein, 520 aa, Human adenovirus
MRRAVVSSPPPSYESVMAQATLEVPFVPPRYMAPTEGRNSIRYSELAPQYDTTRVYLVDNKSADIASLNYQNDHSNFLTTVVQNNDFTPAEASTQTINFDERSRWGGDLKTILHTNMPNVNEYMFTSKFKARVMVARKHPQGVAETDLSQDKLEYEWFEFTLPEGNFSETMTIDLMNNAILENYLQVGRQNGVLESDIGVKFDSRNFKLGWDPVTKLVMPGVYTYEAFHPDVVLLPGCGVDFTESRLSNLLGIRKKQPFQEGFRIMYEDLEGGNIPALLDVEAYLKSKNDREEATQNANRVAANGGGEIRGDTFLTTEQLRAADKELVIKPIKEDASKRSYNVIGDTHDTLYRSWYLSYTYGDPEKGVQSWTLLTTPDVTCGAEQVYWSLPDLMQDPVTFRSTQQVSNYPVVGAELMPFRAKSFYNDLAVYSQLIRSYTSLTHVFNRFPDNQILCRPPAPTITTVSENVPALTDHGTLPLRSSIRGVQRVTVTDARRRTCPYVYKALGIVAPRVLSSRTF

SEQ ID NO: 424 - protein, 224 aa, Vaccinia virus
MVKNNKISNSCRMIMSTNPNNILMRHLKNLTDDEFKCIIHRSSDFLYLSDSDYTSITKETLVSEIVEEYPDDCNKILAIIFLVLDKDIDVDIETKLKPKPAVRFAILDKMTEDIKLTDLVRHYFRYIEQDIPLGPLFKKIDSYRTRAINKYSKELGLATEYFNKYGHLMFYTLPIPYNRFFCRNSIGFLAVLSPTIGHVKAFYKFIEYVSIDDRRKFKKELMSK

SEQ ID NO: 425 - protein, 53 aa, Vaccinia virus
MISNYEPLLLLVITCCVLLFNFTISSKTKIDIIFAVQTIVFIWFIFHFVHSVI

SEQ ID NO: 426 - protein, 629 aa, Human papillomavirus
MADPAGTDGEGTGCNGWFYVEAVIDRQTGDNISEDENEDSSDTGEDMVDFIDNCNVYNNQAEAETAQALFHAQEAEEHAEAVQVLKRKYVGSPLSDISSCVDYNISPRLKAICIENNSKTAKRRLFELPDSGYGNTEVETQQMVQVEEQQTTLSCNGSDGTHSERENETPTRNILQVLKTSNGKAAMLGKFKELYGVSFMELIRPFQSNKSTCTDWCVAAFGVTGTVAEGFKTLLQPYCLYCHLQSLACSWGMVMLMLVRFKCAKNRITIEKLLEKLLCISTNCMLIQPPKLRSTAAALYWYRTGMSNISDVYGETPEWIERQTVLQHSFNDTTFDLSQMVQWAYDNDVMDDSEIAYKYAQLADSDSNACAFLKSNSQAKIVKDCGTMCRHYKRAEKRQMSMGQWIKSRCDKVSDEGDWRDIVKFLRYQQIEFVSFLSALKLFLKGVPKKNCILIHGAPNTGKSYFGMSLISFLQGCIISYANSKSHFWLQPLADAKIGMLDDATTPCWHYIDNYLRNALDGNPVSIDVKHKALMQLKCPPLLITSNINAGKDDRWPYLHSRLVVFTFPNPFPFDKNGNPVYELSDKNWKSFFSRTWCRLNLHEEEDKENDGDSFSTFKCVSGQNIRTL

SEQ ID NO: 427 - protein, 455 aa, Human herpesvirus
MGLFGLTRFIHEHKLVKPSIISTPPGVLTPVAVDVWNVMYTLLERLYPVGKRENLHGPSVTIHCLGVLLRLLTQRSYYPIFVLERCTDGPLSRGAKAIMSRAMNHDERGTSDLTRVLLSSNTSCSIKYNKTSETYDSVFRNSSTSCIPSEENKSQDMFLDGCPRQTDKTICLRDQNVCSLTSTMPSRGHPNHRLYHKLCASLIRWMGYAYVEAVDIEADEACANLFHTRTVALVYTTDTDLLFMGCDILLDAIPMFAPVVRCRDLLQYLGITYPEFLVAFVRCQTDLHTSDNLKSVQQVIQDTGLKVPHQMDTSTRSPTYDSWRHGEVFKSLTVATSGKTENGVSVSKYASNRSEVTVDASWALNLLPPSSSPLDNLERAFVEHIIAVVTPLTRGRLKLMKRVNIMQNTADPYMVINTLYHNLKGEKMARQYARIFKQFIPTPLPLNTVLTKYWN

SEQ ID NO: 428 - protein, 151 aa, Vaccinia virus
MEREGVDYHYVNREAIWKGIAAGNFLEHTEFLGNIYGTSKTAVNTAAINNRICVMDLNIDGVRSFKNTYLMPYSVYIRPTSLKMVETKLRCRNTEANDEIHRRVILAKTDMDEANEAGLFDTIIIEDDVNLAYSKLIQILQDRIRMYFNTN

SEQ ID NO: 429 - protein, 510 aa, Human papillomavirus
MTLWLPTSGKIYLPPTPPVARVQNTDEYVERTDIYYHAISDRLLTVGHPYFDVRSSDGAKIEVPKVSGNQFRAFRVTFPDPNKFALGDMTIHDPERYRLVWACKGLEIGRGQPLGVGTTGHPLFNKLHDTENPTERQEGTSDDRRNVSFDPKQVQMFIIGCIPCLGEYWDKAPVCEDAGSQVGLCPPLELKNGVIEDGDMFDIGFGNINNKTLSFNRSDVSLDIVNEICKYPDFLTMSNDVYGDSCFFCARREQCYARHNFVRGGLVGDAIPDDAVQQDHKYYLPAASQTALENSTYFPTVSGSLVTSDAQLFNRPFWLKRAQGHNNGILWNNQMFVTVADNTRNTNFSISVASDGTTVNYDAKKIREFMRHVEEYQLSFILQLCRIPLEAEVLTQINAMNHGILENWQLGFVPTPDNSVHDTYRYLQSKATKCPDAVPDTQKEDPFGQYTFWNVDMSEKLSLDLDQYPLGRKFLFQSGLQRARASARVSVKRSATRKTSKTVKRRKLTS

SEQ ID NO: 430 - protein, 371 aa, Vaccinia virus
MAAEQRRSTIFDIVSKCIVQSVLRDISINSEYIESKAKQLCYCPASKKESVINGIYNCCESNIEIMDKEQLLKILDNLRCHSAHVCNATDFWRLYNSLKRFTHTTAFFNTCKPTILATLNTLITLILSNKLLYAAEMVEYLENQLDSSNKSMSQELAELLEMKYALINLVQYRILPMIIGEPIIVAGFSGKEPISDYSAEVERLMELPVKTDIVNTTYDFLARKGIDTSNNIAEYIAGLKIEEIEKVEKYLPEVISTIANSNIIKNKKSIFPANINDKQIMECSRMLDTSEKYSKGYKTDGAVTSPLTGNNTITTFIPISASDMQKFTILEYLYIMRVMANNVKKKNVGKNNGGVVMHINSPFKVINLPKC

SEQ ID NO: 431 - protein, 495 aa, Human adenovirus
MEPGHPTKQGLHSGLCSHAPVEGLDEAAGTENLELLASTASSFGSSSSTQTNIHVGGRNEGGHGQEPEERPGPSVGRGAGLNEVSSLYPELSKVLTSMARGVKRERSDGGNTGLMTQLTASLMNRKRPERITWHELQQECRDEIGLMQDKYGLEQIKTHWLNPDEDWEEAIKKYAKIALRPDCKYRVTKTVNIKHACYISGNGAEVDIDTLDKSAFRCCMMGMRAGVMNMNSMIFINIKFNGEKFNGVLFMANSHMTLHGCSFFGFNNMCAEVWGAAKIRGCKFYGCWMGVVGRPKSEMSVKQCVFEKCYLGVCTEGNARVRHCSSLETGCFCLVKGTASIKHNVVKGCTDERMYNMLTCDSGVCHILKNIHVTSHPRKKWPVFENNLLIKCHMHLGARRGTFQPYQCNFSQTKLLLENDAFSRVNLNGIFDMDVSVYKILRYDETKSRVRACECGGRHTRMQPVALDVTEELRPDHLVMACTGTEFSSSGEDTD

SEQ ID NO: 432 - protein, 214 aa, Variola virus
MIMSTDPNNILMRYLKNLTDDKFKCIIHQSSDFLYLSDRDYTSITKETLVSEIVEEYPDDCNKILAIIFLVLDKDIDVDIDIETKLKPKPAVRYAILDKMTKDIKLTDLVRHYFRYIEQDIPLGPLFKKIDSYRIRAINKYSKELGLATEYFNKYGHLMFYTLPIPYNRFFCRNSIGFLAVLSPTIGHVKAFYKFIEYVSIDDRRKFKKELMSK

SEQ ID NO: 433 - protein, 725 aa, Vaccinia virus
MEVTNLIEKCTKHSKDFATEVEKLWNDELSSESGLSRKTRNVIRNILRDITKSLTTDKKSKCFRILERSTINGEQIKDVYKTIFNNGVDVESRINTTGKYVLFTVMTYVAAELRLIKSDEIFALLSRFFNMICDIHRKYGCGNMFVGIPAALINLLEIDHINKLFSVFSTRYDAKTYLYTEYFLFLNINHYLVSGSELFINVAYGAVSFSSPISVPDYIMEALTFKACDHIMKSGDLKYTYAFTKKVKDLFNTKSDSVYQYVRLHEMSYDGVSEDTDDDDEVFAILNLSIDSSVDRYRNRVLLLTPEVASLRKEYSEVEPDYKYLMDEEVPAYDKHLPKPITNTGIEEPHATGGDEDQPIKVVHPPNNDKDDAIKPYNPLEDPNYVPTITRTAIGIADYQLVINKLIEWLDKCEEECGNSGEFKTELEEAKRKLTELNAELSDKLSKIRTLERDSVYKTERIDRLTKEIKEHRDIQNGTDDGSDLLEIDKKTIRELRESLDREREMRSELEKELDTIRNGKVDGSCQRELELSRMWLKQRDDDLRAEIDKRRNVEWELSRLRRDIKECDKYKEDLDKAKTNISNYVSKISTLESEIAKYQQDRDTLSVVRRELEEERRRVRDLESRLDECTRNQEDTQEVDALRSRIRELENKLTDCIESGGGNLTEISRLQSKISDLERQLSECRENATEISRLQSRISDLERQLNDCRRNNETNAETERDATS

SEQ ID NO: 434 - protein, 647 aa, Human papillomavirus
MADSGNWEGRCSGWFNVEAIVERKTGDAIPADENYDGDDTEDSEMGDFIDNAHISNIYSQQEIAQALYHSQQVNADNEAIRVLKRKFAGSAGSSPDSKRHELKHKQRSPHILTIRDTNTTSTHLLCEEQDSGYGNTEVETYERQVPGPGGCLQSTSSSNNGSQMASPGETNSGSSSISNMDIDMESTPITDITNILKSSNVKATLLAKFKEVYGLSYMELVRPYKSDKTQCQDWVCAVFGVAPSLAESLKSLLTQYCLYIHLQCLTCSWGIIVLLLARFKCNKNRLTVQKLLHGLLNVTQEYMLIEPPRLRSTPCALYWYRTSLSNISETVGEVPEWIKRQTVVQHSLEDCQFDLSQMVQWAFDNDITNDCEIAYKYALLASEDSNAAAFLKSNAQAKYVKDCGTMCRHYKAAERKQMTMSQWITHRCDLIDDGGNWKHIVQFLRYQQVEFVPFLIALKQFLKGIPKQNCIVIYGPPDTGKSHFGMSLMQFMQGVVISYVNSNSHFWLSPLADAKMALLDDATPACWTYIDRYLRNALDGNPMCLDRKHKHLLQIKCPPLLITSNTNPKADDTWKYLHSRMKVFTFSNPFPFDSNGNPLYQLTNENWKAFFTKTWSKLDLTEDDDKENDGDTVQTFKCVSGRNPRTV

SEQ ID NO: 435 - protein, 240 aa, Human herpesvirus
MNPPQARVSEQTKDLLSVMVNQHPEEDAKVCKSSDNSPLYNTMVMLSYGGDTDLLLSSACTRTSTVNRSAFTQHSVFYIISTVLIQPICCIFFFFYYKATRCMLLFTAGLLLTILHHFRLIIMLLCVYRNIRSDLLPLSTSQQLLLGIIVVTRTMLFCITAYYTLFIDTRVFFLITGHLQSEVIFPDSVSKILPVSWGPSPAVLLVMAAVIYAMDCLVDTVSFIGPRVWVRVMLKTSISF

SEQ ID NO: 436 - protein, 77 aa, Variola virus
MEDLNEANFSHLLINLSNNKDIDAQYASTLSVVHELLSAINFKIFNINKKSKKNSKSIEQHPVVHHAASAGREFNRR

SEQ ID NO: 437 - protein, 594 aa, Human papillomavirus
MMFMLILMSCSHWTITTQPLAAPWLIPRYLPPLHLHCEGPLQPLSRVVLMCLCILGLILNHPLFLVWGPSFLWLHRCHPLFTYLGGIIIYCQVISCGLNDVNVSTISLQMALWRPNESKVYLPPTPVSKVISTDVYVTRTNVYYHGGSSRLLTVGHPYYSIKKGSNNRLAVPKVSGYQYRVFHVKLPDPNKFGLPDADLYDPDTQRLLWACVGVEVGRGQPLGVGVSGHPYYNRQDDTENAHTLDSAEDGRENISMDYKQTQLFILGCKPSIGEHWSKGTTCNGSSAAGDCPPLQFTNSTIEDGDMVETGFGALDFATLQSNRSDVPLDICTNVCKYPDYLKMAAEPYGDSMFFSLRREQMFTRHFFNRAGKMGDTIPDELYIKSTTISDPGSHVYTSTPSGSMVSSEQQLFNKPYWLRRAQGHNNGMCWGNRIFLTVVDTTRSTNVSLCAAEVSDNTNYKATNFKEYLRHMEEYDLQFIFQLCKITLTPEIMAYIHNMDPQLLEDWNFGVPPPPSASLQDTYRYLQSQAITCQKPTPPKTPTDPYANMTFWDVDLRESFSMDLDQFPLGRKFLLQRGTTPTVSRKRTAVGRGH

SEQ ID NO: 438 - protein, 521 aa, Human immunodeficiency virus
MGARNSVLRGKKADELEKVRLRPGGKKKYRLKHIVWAANELDKFGLAESLLESKEGCQKILRVLDPLVPTGSENLKSLFNTVCVIWCLHAEEKVKDTEEAKKLAQRHLVAETGTAEKMPNTSRPTAPPSGKRGNYPVQQAGGNYVHVPLSPRTLNAWVKLVEEKKFGAEVVPGFQALSEGCTPYDINQMLNCVGDHQAAMQIIREIINEEAADWDSQHPIPGPLPAGQLRDPRGSDIAGTTSTVDEQIQWMYRPQNPVPVGNIYRRWIQIGLQKCVRKYNPTNILDIKQGPKEPFQSYVDRFYKSLRAEQTDPAVKNWMTQTLLIQNANPDCKLVLKGLGMNPTLEEMLTACQGVGGPGQKARLMAEALKEAMGPSPIPFAAAQQRKAIRYWNCGKEGHSARQCRAPRRQGCWKCGKPGHIMANCPERQAGFLGLGPRGKKPRNFPVTQAPQGLIPTAPPADPAAELLERYMQQGRKQREQRERPYKEVTEDLLHLEQRETPHREETEDLLHLNSLFGKDQ

SEQ ID NO: 439 - protein, 106 aa, Human adenovirus
MSYGDSAELARLRHLDHCRRLHCFARESCGLIYFELPKEHPNGPAHGVRITVEGTTESHLVRFFTQQPFLVERDRAATTYTVYCICPTPKLHENFCCTLCGEFNKS

SEQ ID NO: 440 - protein, 144 aa, Human adenovirus
MNGTTQNNAALFDGGVFSPYLTSRLPYWAGVRQNVVGSTVDGRPVAPANSSTLTYATIGPSPLDTAAAAAASAAASTARSMAADFSFYNHLASNAVTRTAVREDILTVMLAKLETLTAQLEELSQKVEELADATTHTPAQPVTQ

SEQ ID NO: 441 - protein, 270 aa, Vaccinia virus
MNCFQEKQFSRENLLKMPFRMVLTGGSGSGKTIYLLSLFSTLVKKYKHIFLFTPVYNPDYDGYIWPNHINFVSSQESLEYNLIRTKSNIEKCIAVAQNHKKSAHFLLIFDDVGDKLSKCNTLIEFLNFGRHLNTSIILLCQTYRHVPILGRANITHFCSFNISISDAENMLRSMPVKGKRKDILNMLNMIQTARSNNRLAIIIEDSVFCEGELRICTDTADKDVIEQKLNIDILVNQYSHMKKNLNAILESTKTKLCNSDQSSSSKNVSS

SEQ ID NO: 442 - protein, 83 aa, Human papillomavirus
MTNLDTASTTLLACFLLCFCVLLCVCLLIRPLLLSVSTYTSLIILVLLLWITAASAFRCFIVYIIFVYIPLFLIHTHARFLIT

SEQ ID NO: 443 - protein, 235 aa, Molluscum contagiosum virus
MARGGKSGPRPWPDLLSHVRLVIVLVALLFLYSRACELEISTQVGPNGTTILTCLGCTNHTHVSLIYWIVNESFPEQLDSSLSEGRTHKHKFPNQSLTEISTNLTVGPDVATHSTNFSCVLVDPEQVVQRHLALTPPGTTPPTATRTPPENADAAGARRRRRGAPTSPGAPTPPGAPTSPGAPTLPGAPKVVGTPPPKGNKKNKKKGKGKKRRGNKTKHKNDKKRGGIPKNRHVR

SEQ ID NO: 444 - protein, 95 aa, Variola virus
MSCYTAILKSVGGLALFQDANGAIDLCRHFFMYFCEQKLRPNSFWFVVVRAIASMIMYLVLGIALLYISEQDDKKNTNNASNSNKLNESSINSNS

SEQ ID NO: 445 - protein, 527 aa, Human papillomavirus
MVRARRTKRASVTDIYRGCKASNTCPPDVINKVEQSTIADKILKYGSAAVFFGGLGISTGRGTGGATGYVPLGQGPGVRVGGAPTVVRPGVIPEVIGPTELIPIDSVTPIDPTAPSIVSLTDSSAVDLLPGEVETIAEVHPGPIDPIEIDTPVVSGGRNTNAILEVADPHPPTRATVSRTQYNNPAFQIISEVIPTSGESSLADHVLVSEGSGGQQIGGTRTAEEIELQPLLSRYSFEIEEPTPPRRTSTPLQRARQQFSSLRRALYNRRLTEQVGVTDPLFFTSPSKLVRFQFDNPVFDEQVTQIFEQDIADFEEPPDRQFLDVVKLGRPTLTESAEGYVRVSRLGRRGTIRTRSGTQIGSQVHFYRDLSTINTEEPLEMQLLGEHSGDASIVQGPVESTLVDVNVTEVPEGVLTETSMDPDTFNSEDLLLDDAIEDFSGSQLVVGTPRRSTTSITVPRFQTPQNPTIYYQDIQGYHVSYPESRERPAIIYPTPDIPTVVIHVADSSGDFYLHPSLRWRRRKRKYL

SEQ ID NO: 446 - protein, 500 aa, Human immunodeficiency virus
MGARASVLSGGELDRWEKIRLRPGGKKKYKLKHIVWASRELERFAVNPSLLETSEGCRQILGQLQSSLQTGSEELKSLYNTVATLYCVHQRIEVKDTKEALDKIEEEQNKSKKKAQQAAADTGNSSQVSQNYPIVQNIQGQMVHQAISPRTLNAWVKVVEEKAFSPEVIPMFSALSEGATPQDLNTMLNTVGGHQAAMQMLKETINEEAAEWDRLHPVQAGPVAPGQMREPRGSDIAGTTSTLQEQIGWMTNNPPIPVGEIYKRWIILGLNKIVRMYSPSSILDIKQGPKEPFRDYVDRFYKTLRAEQASQEVKNWMTETLLVQNANPDCKTILKALGPGATLEEMMTACQGVGGPGHKARVLAEAMSQVTNSATIMMQRGNFRNQRKTVKCFNCGKEGHIAKNCRAPRKKGCWKCGKEGHQMKDCTERQANFLGKIWPSHKGRPGNFLQSRPEPTAPPEESFRFGEETTTPSQKQEPIDKELYPLASLRSLFGNDPSSQ

SEQ ID NO: 447 - protein, 79 aa, Human adenovirus
MCCWFYPAPRVSSPLGYDPDPKGNKNFKKMYVSVPVSRYPGSGKSPDGKRVRALDPALPLFIPGLPAVPGGRHPAGRVV

SEQ ID NO: 448 - protein, 786 aa, Human astrovirus-
MASKSNKQVTVEVSNNGRSRSKSRARSQSRGRDKSVKITVNSRNRARRQPGRDKRQSSQRVRNIVNKQLRKQGVTGPKPAICQRATATLGTVGSNTSGTTEIEACILLNPVLVKDATGSTQFGPVQALGAQYSMWKLKYLNVKLTSMVGASAVNGTVSGVSLNPTTTPTSTSWSGLGARKHLDVTVGKNATFKLKPSDLGGPRDGWWLTNTNDNASDTLGPSIEIHTLGRTMSSYKNEQFTGGLFLVELASEWCFTGYAANPNLVNLVKSTDNQVSVTFEGSAGSPLIMNVPEGSHFARTVLARSTTPTTLARAGERTTSDTVWQVLNTAVSAAELVTPPPFNWLVKGGWWFVKLIAGRTRTGSRSFYVYPSYQDALSNKPALCTGSTPGGMRTRNPVTTTLQFTQMNQPSLGHGEAPAAFGRSIPAPGEEFKVVLTFGAPMSPNANNKQTWVNKPLDAPSGHYNVKIAKDVDHYLTMQGFTSIASVDWYTIDFQPSEAPAPIQGLQVLVNSSKKADVYAIKQFVTAQTNNKHQVTSLFLVKVTTGFQVNNYLSYFYRASATGDATTNLLVRGDTYTAGISFTQGGWYLLTNTSIVDGAMPPGWVWNNVELKTNTAYHMDKGLVHLIMPLPESTQMCYEMLTSIPRSRASGHGYESDNTEYLDAPDSADQFKEDIETDTDIESTEDEDEADRFDIIDTSDEEDENETDRVTLLSTLVNQGMTMTRATRIARRAFPTLSDRIKRGVYMDLLVSGASPGNAWSHACEEARKAAGEINPCTSGSRGHAE

SEQ ID NO: 449 - protein, 75 aa, Vaccinia virus
MKYDVIVYWYIWKEFYQSRNKRLISHRNTKVHNLIIEEHFVTIVINIHSVICINEVLFKHDEMFICWHSSEIYVW

SEQ ID NO: 450 - protein, 401 aa, Human papillomavirus
MENLSSRLDLLQEQLMNLYEQDSKLIEDQIKQWNLIRQEQVLFHFARKNGVMRIGLQAVPSLASSQEKAKTAIEMVLHLESLKDSPYGTEDWSLQDTSRELFLAPPAGTFKKSGSTLEVTYDNNPDNQTRHTIWNHVYYQNGDDVWRKVSSGVDAVGVYYLEHDGYKNYYVLFAEEASKYSTTGQYAVNYRGKRFTNVMSSTSSPRAAGAPAVHSDYPTLSESDTAQQSTSIDYTELPGQGETSQVRQRQQKTPVRRRPYGRRRSRSPRGGGRREGESTPSRTPGSVPSARDVGSIHTTPQKGHSSRLRRLLQEAWDPPVVCVKGGANQLKCLRYRLKASTQVDFDSISTTWHWTDRKNTERIGSARMLVKFIDEAQREKFLERVALPRSVSVFLGQFNGS

SEQ ID NO: 451 - protein, 526 aa, Cercopithecine herpesvirus
MELAYASTTHHRDVVFYLTADGNRAYFVCGGCVYSVCRPRSQHPGEIAKFGLVVRGTGPDDRVVANYVRSELRRRGLSDVQPVGEHEVFLDSVCLLHPDVSAEADVANAADAEVVDECLAQYLTSLRTSPGVVVTGVRVRAQDKIIELFELPAIVNSSSRFVYTPSPYAFALVQAHLPRLPASLERLAEGLFDGIPVPRPPLDRDPVAGRTDVLITGQRSARPIAGSMAGARGAKRTTVSEFVQVKHIDRVRRPDAPRSPPSPAALPPAATPGDIWTVFFGGERALGEASPVDYLTPEEDRARRVFGEQAWRLFGSAGAPRPFLGAAMALTPLQKLATAYYLVHREKRSPVFPALVGIVRGHLQHHGIGVPPTDEPFVAESANELFRDALALGAVAEQLLMFDILPPREVAVGSDARADGETVLRIVAAQYGSEQDNAPATPSQAHVTFAGAFAELLYAGRGRLAAATEVARMTGVTSLVLAVGDVDRLSAFDRGLVGATTRTRVATYLAALLAAHLVRARHGQSV

SEQ ID NO: 452 - protein, 319 aa, Variola virus
MTTVPVTDIQNDLITEFSEDNYPSNKNYEITLRQMSILTHVNNVVDREHNAAVVSSPEEISSQLNEDLFPDDDSPATIIERVQQPHTTIIDDTPPPTFRRELLISEQRQQREKRFNITVSKNAEAIMESRSMITSMPTQTPSLGVVYDKDKRIQMLEDEVVNLRNQQSNTKSSNNLDNFTRILFGKTPYKSTEVNKRIAIVNYANLNGSPLSVEDLDVCSEDEIDRIYKTIKQYHESRKRKIIVTNVIIIVINIIEQALLKLGFDEIKGLSTDITSEIIDVEIGDDCDAVASKLGIGNSPVLNIVLFILKIFVKRIKII

SEQ ID NO: 453 - protein, 224 aa, Variola virus
MNLRLCSGCRHNGIVSEQGYEYCIFCESVFQKCTKVQKKSNFHVSNKLIHLRNVLRRLLSHQCSGEIISELLDIMEKNQISTDDVDANFVSSFLKANERINKKDYKLVFEIINQVKDEKLNLSTEKINEVVEIFKHLVFFCQENTPSKTINYSFFLDKIFDITSVTKNLKPQTVKNYTKNNSNQLVWENFLAHMRSKKRVTMVEDYGHEYVFVDERFSTCSLEV

SEQ ID NO: 454 - protein, 500 aa, Human immunodeficiency virus
MGARASVLSGGELDRWEKIRLRPGGKKKYKLKHIVWASRELERFAVNPGLLETSEGCRQILGQLQPSLQTGSEELRSLYNTVATLYCVHQRIEIKDTKEALDKIEEEQNKSKKKAQQAAADTGHSNQVSQNYPIVQNIQGQMVHQAISPRTLNAWVKVVEEKAFSPEVIPMFSALSEGATPQDLNTMLNTVGGHQAAMQMLKETINEEAAEWDRVHPVHAGPIAPGQMREPRGSDIAGTTSTLQEQIGWMTNNPPIPVGEIYKRWIILGLNKIVRMYSPTSILDIRQGPKEPFRDYVDRFYKTLRAEQASQEVKNWMTETLLVQNANPDCKTILKALGPAATLEEMMTACQGVGGPGHKARVLAEAMSQVTNSATIMMQRGNFRNQRKIVKCFNCGKEGHTARNCRAPRKKGCWKCGKEGHQMKDCTERQANFLGKIWPSYKGRPGNFLQSRPEPTAPPEESFRSGVETTTPPQKQEPIDKELYPLTSLRSLFGNDPSSQ

SEQ ID NO: 455 - protein, 575 aa, Epstein-Barr virus
MLAHLKQVTRIPPCPPFSGREARLKFHFFSWSTFMLSWPNNATLREIRTRAATNLTHHPHLVDTLYHASPQTPFLTRSGALYRFVTCCNCTLPNISIQQCKAGDRPGDLEIILQSNGGGRPASFQFPSSPTGALLRCIVAAALLPEVSVGHQELSPLMSRSHGGQTDVRSGPDPARRLVALLRREDGAPKDPPLGPFGHPRGPGPAKSEDEESERRDAPPPPLDFSFQASRLVPVGPGFRLLVFNTNRVINTKLVCSEPLVKMRVCNVPRLINNFVARKYVVKETAFTVSLFFTDGVGANLAINVNISGTYLSFLLAMTSLRCFLPVEAIYPAAVSNWNSTLDLHGLENQSLVRENRSGVFWTTNFPSVVSCQDGLNVSWFKAATATISRVHGRTLEQHLIREITPIVTHREAKISRIKNRLFTLLELRNRSQIQVLHKRFLEGLLDCASLLRLDPSCINRIASEGLFDFSKRSIAHSKNRHECALLGHRHSANVTKLVVNERKTRLDILGRNANFLTRCKHQVNLRQSPIFLTLLRHIRRRLGLGRASVKREITLLLAHLRKKTAPIHCRDAQV

SEQ ID NO: 456 - protein, 723 aa, Torque teno virus
MPWWPWRRWRRWRRRRGNWRRRVAPRRYRRTARRARRRRKAVRRRRRRRVRRRGYYRRYRRRRRYKRRLLILKQWQPTTNLRLTVKGLIPVVVMGKGKTQNNFGQWEQTVPLEGESYGGSFTIRKFTLQTLYEDYLKLRNRWSRSNTDLELIRYTGLNLRLYRHEFSDYIVHYSLETPMEVGLESHMLAHPLKMIMSSKHVTVPSLLTKKGGRRYLRLKIPPPKLMMTQWYFQKEFCQVGLVLLSISTATLMHPWMAPFVNSPALTIYAVNHKTYSDMSILPSNNQGSTKNELIETLYTAEHTYNPMAQRIWGNIKPQNTNFTPENYWNKWNEIHTKIKTNRQSELTQLKQMRKRLELTTENDYQDPNFGLSYGLYSPLLLYPEMYFPEQSKVYQKARYNPLLDQGIGNVVWTEPLTKKTCDYASQAYNVIKDAPLYLALFGYIDICSKLAKDKSFYLSNRVCVKCPYTVPQLLSKTNATLGHVILSENFMRGLVPSKDSYVPLYMRGKWYPSIYHQEEVIEAIVSSGPFVPRDQITKSLDITIGCRFGFRIGGNLLNPKQVGDPCKQPTHPLPAPGGGDLLRAVQVSDPRKVGIQFHPWDLRRGMLSTSSIKRMLQDSDDDESIEFPPKAWPGDPVPVGRTLEERCSSSLYHLLQEQATPPPFKKPRTEDQEENPEETTQLQLFQELQRQRELQLQLKRGFRGLVEEMIKSHRHLALDPYLK

SEQ ID NO: 457 - protein, 150 aa, Vaccinia virus
MAKRVSLPDVVISAPKAVFKPAKEEALACILPKYYKSMADVSIKTNSVIDKCWFCNQDLVFRPISIETFKGGEVGYFCSKICRDSLASMVKSHVALREEPKISLLPLVFYEDKEKVINTINLLRDKDGVYGSCYFKENSQIIDISLRSLL

SEQ ID NO: 458 - protein, 367 aa, Human papillomavirus
MEAIAKRLDACQDQLLELYEENSIDIHKHIMHWKCIRLESVLLHKAKQMGLSHIGLQVVPPLTVSETKGHNAIEMQMHLESLAKTQYGVEPWTLQDTSYEMWLTPPKRCFKKQGNTVEVKFDGCEDNVMEYVVWTHIYLQDNDSWVKVTSSVDAKGIYYTCGQFKTYYVNFNKEAQKYGSTNHWEVCYGSTVICSPASVSSTVREVSIAEPTTYTPAQTTAPTVSACTTEDGVSAPPRKRARGPSTNNTLCVANIRSVDSTINNIVTDNYNKHQRRNNCHSAATPIVQLQGDSNCLKCFRYRLNDKYKHLFELASSTWHWASPEAPHKNAIVTLTYSSEEQRQQFLNSVKIPPTIRHKVGFMSLHLL

SEQ ID NO: 459 - protein, 791 aa, Molluscum contagiosum virus
MARAVDGNEVIFVLKTLAVPADCRRREDPRFVEAFAPDELDAYIREHPRCTLFETLRDEEAYSVVRVFFDVDLGAPLPAHELLPAFDGFIRALSRFVANFAVDECAAPASRAALARALRADFSLTRSTNPGKTSFHLVFRNLYTTLDTLVAMKRPLLALARRADNPLLRALDPAVFRRGASLRVVGTRKTPDSPHVHARTPPHTRIQDYLFTFVDFSEKSCYFSLRPRRDAPEPIAWDHQQLVPFADAMRKVCQVLGNEILNLHEFTEDNFTTTPLLLDYVTPCALCRKSAHKHPHHLALGNGALRIFKSGNPHSCRLKVIPLEGNRLFTIAQRILDANVINLTERGDYIVWLRNCWRFSGEESVITKLVLHMRDELAPEFALPLLCPRNRRVIEHNLRDMLVDAVETDVFPEKLPFADGVLDIADGSFHTGADAKDFMCTVSTGYRLERDARARDALAPARAELERVLDDIQPRSPGNAENRALYEKVLASCLCGATKPCIFFFFGETATGKSTTKKLLQSALHGLFLETGQTILTDLMDKGPNPFLANMHLKRAVFCSELPDFSCSGAKKIRADNVKRLTEPCLVGRPCYSNRINNRNHATIIIDTNYRPVFDKVDNALMRRVGLVRFRTHFSNRGAPASRLYDTVKPLDAALDRKIQSHYFRFAFLELLLEWYQRHHAAALELEPTPDLIPDFCFQRRLDAVLLPSDSTHRRLMPQLAKLGYVLAGDDALGMPGALFQQRLAEHFNVRVFGQEIESFVQKNKKYVSVSEDYVEYIFVADLEKAKAETQ

SEQ ID NO: 460 - protein, 189 aa, Variola virus
MADKKNLAVRSSYDDYIETVNKITPQLKNLLAQIGGDAAVKGGNNNLNSQTDVTAGACDTKSKSSKCITCKSKSSSSSTSTSKSSKNTSGAPRRRTTATTSFNAMDGQIVQAVTNAGKIVYGTVRDGQLEVRGMVGEINHDLLGIESVNAGKKKPSKKMPTNKKINMSSGMRRQEQINPNDCCLDMGMY

SEQ ID NO: 461 - protein, 518 aa, Human papillomavirus
MARARRVKRDSVTHIYQTCKQAGTCPSDVVNKVEQTTVADNILKYGSAGVFFGGLGIGTGRGTGGATGYVPLGEGPGVRVGGTPTVVRPSLVPEAIGPVDILPIDTIAPVEPTASSLVPLTESSGADLLPGEVETIAEIHPIPEGPTIDSPVVTTTTGSSAVLEVAPEPVPPTRVRIARTQYHNPSFQILTESTPAQGESSLADHILVTSGSGGQRIGGDITDEIELTEFPSRYTFEIEEPTPPRKSSTPLQTVASAVRRRGFSLTNRRLVQQVAVDNPLFLSQPSKMVRFSFDNPAFEEEVTNIFEQDVNSFEEPPDRDFLDIKQLGRPQYSTTPAGYIRVSRLGTRGTIRTRSGAQIGSQVHFYRDLSSINTEDPIELQLLGQHSGDATIVQGPVESTFIDMDIAENPLSETIDASSNDLLLDETVEDFSGSQLVIGNRRSTTSYTVPRFETTRSSSYYVQDTDGYYVAYPESRDTIDIIYPTPELPVVVIHTHDNSGDFYLHPSLRRRKRKRKYL

SEQ ID NO: 462 - protein, 521 aa, Human immunodeficiency virus
MGARNSVLRGKKADELEKIRLRPGGKKKYRLKHIVWAANELDRFGLAESLLESKEGCQKILTVLDPLVPTGSENLKSLFNTVCVIWCIHAEEKAKDTEEAKQKVQRHLVAETKTTEKMPSTSRPTAPPSGNGGNFPVQQVAGNYTHVPLSPRTLNAWVKLVEEKKFGAEVVPGFQALSEGCTPYDINQMLNCVGDHQAAMQIIREIINEEAADWDAQHPIPGPLPAGQLREPRGSDIAGTTSTVEEQIQWMFRPQNPVPVGSIYRRWIQIGLQKCVRMYNPTNILDIKQGPKEPFQSYVDRFYKSLRAEQTDPAVKNWMTQTLLVQNANPDCKLVLKGLGINPTLEEMLTACQGVGGPGQKARLMAEALKEAMAPAPIPFAAAQQRRTIKCWNCGKEGHSARQCRAPRRQGCWKCGKAGHIMAKCPERQAGFLGLGPWGKKPRNFPVAQIPQGLTPTAPPIDPVEDLLEKYMQQGKRQREQRERPYKEVTEDFLQLEKQETPCRETTEDLLHLNSLFGKDQ

SEQ ID NO: 463 - protein, 149 aa, Human papillomavirus
MFQDPAERPYKLHDLCNEVEESIHEICLNCVYCKQELQRSEVYDFACYDLCIVYREGQPYGVCMKCLKFYSKISEYRWYRYSVYGETLEKQCNKQLCHLLIRCITCQKPLCPVEKQRHLEEKKRFHNIGGRWTGRCMSCWKPTRRETEV

SEQ ID NO: 464 - protein, 497 aa, Human adenovirus
MRRAVELQTVAFPETPPPSYETVMAAAPPYVPPRYLGPTEGRNSIRYSELSPLYDTTRVYLVDNKSSDIASLNYQNDHSNFLTTVVQNNDYSPIEAGTQTINFDERSRWGGDLKTILHTNMPNVNDFMFTTKFKARVMVARKTNNEGQTILEYEWAEFVLPEGNYSETMTIDLMNNAIIEHYLRVGRQHGVLESDIGVKFDTRNFRLGWDPETQLVTPGVYTNEAFHPDIVLLPGCGVDFTESRLSNILGIRKRQPFQEGFVIMYEHLEGGNIPALLDVKKYENSLQDQNTVRGDNFIALNKAARIEPVETDPKGRSYNLLPDKKNTKYRSWYLAYNYGDPEKGVRSWTLLTTPDVTGGSEQVYWSLPDMMQDPVTFRSSRQVSNYPVVAAELLPVHAKSFYNEQAVYSQLIRQSTALTRVFNRFPENQILVRPPAATITTVSENVPALTDHGTLPLRSSISGVQRVTITDARRRTCPYVYKALGIVSPRVLSSRTF

SEQ ID NO: 465 - protein, 53 aa, Vaccinia virus
MNSESDNISIKTEYEFYDETQDQSTQLVGYDIKLKTNEDDFMAMIDQWVSMII

SEQ ID NO: 466 - protein, 643 aa, Human papillomavirus
MADDTGTEEGLGCSGWFCVEAIVDKTTENAISDDEDENVDDSGLDLVDFVDNSTVIHTKQVHAQALLNKQQAHADQEAVQALKRKLLGSPYESPVSDSQHSIDNELSPRLGGLTLCRGSQGAKRRLFQSLENRDSGYGYSEVEVQQTQVEHGHGAVHGTMGNGGAVGSELGVQENEEGSTTSTPTTRVVELLKCKNLHATLLGKFKELFGVSFGDLVRQFKSDKSSCTDWVIAAFGVNHSIAEGFNTLIKADSLYTHIQWLTCTWGMVLLMLIRFKCGKNRTTVSKGLSKLLNIPTNQLLIEPPRLQSVAAAIYWFRSGISNASIVTGDTPEWIQRQTILEHCFADAQFNLTEMVQWAYDNDITEDSDIAYEYAQRADRDSNAAAFLKSNCQAKYVKDCGVMCRHYKKAQMRRMSMGAWIKHRSAKIGDSGDWKPIVKFIRYQQIDFLAFMSAFKKFLHNIPKKSCLVLIGPPNTGKSQFGMSLINFLAGTVISFVNSHSHFWLQPLDSAKIAMLDDATPPCWTYLDIYLRNLLDGNPCSIDRKHKALTVVKCPPLLITSNTDIRTNDKWKYLYSRVSLFEFPNPFPLDTNGNPVYELNDKNWKSFFQRLWSSLEFQESEDEEDYGETGQTFRCVPGTVVRTV

SEQ ID NO: 467 - protein, 406 aa, Molluscum contagiosum virus
MNHFVKQVAARARKPARELERVEGDVPYARVLLRFDFSALHYNHGALFCKRENTLEDVDKSLLVLAAFRYEAYVLRTLVRTLTERGRAHVYDIYFLPVGWLAGVAADVPPAHAALRLLHSGRLDALERRARELLAQHDVLGVELEDEGPCSVPRFALPAAHDAPAPVAVLAFYPFDPGLLLAVVFFGRHGDAHCGLAYTAPRAQLPALAAALHAHVADLYLLHDEVGHFSSTRVHNNAPLRFPAETCAGLCEVTRAFAHERFAAARALVAHVPPPFVPKQLVSIVDLPCDTELTCASVHGIDFVTHISGRRLHTVLLLAKEGFMADTVFAGVFSKRNMVWRGRYTFRVLRASFPCPELRGAGSASGADGEDTGTAHAAGRRALRAACHKHCFRGSRYTTRTPAHVV

SEQ ID NO: 468 - protein, 74 aa, Human parvovirus
MQMPSTQTSKPPQLSQTPVSAAVVVKALKNSVKAAFLTSSPQAPGTLKPRALVRPSPGPVQENHLSEAQFPPKL

SEQ ID NO: 469 - protein, 94 aa, Human herpesvirus
MDTKGILLVAVLTALLCLQSGDTLGASWHRPDKCCLGYQKRPLPQVLLSSWYPTSQLCSKPGVIFLTKRGRQVCADKSKDWVKKLMQQLPVTAR

SEQ ID NO: 470 - protein, 904 aa, Human herpesvirus
MRGGGLICALVVGALVAAVASAAPAAPAAPRASGGVAATVAANGGPASRPPPVPSPATTKARKRKTKKPPKRPEATPPPDANATVAAGHATLRAHLREIKVENADAQFYVCPPPTGATVVQFEQPRRCPTRPEGQNYTEGIAVVFKENIAPYKFKATMYYKDVTVSQVWFGHRYSQFMGIFEDRAPVPFEEVIDKINTKGVCRSTAKYVRNNMETTAFHRDDHETDMELKPAKVATRTSRGWHTTDLKYNPSRVEAFHRYGTTVNCIVEEVDARSVYPYDEFVLATGDFVYMSPFYGYREGSHTEHTSYAADRFKQVDGFYARDLTTKARATSPTTRNLLTTPKFTVAWDWVPKRPAVCTMTKWQEVDEMLRAEYGGSFRFSSDAISTTFTTNLTEYSLSRVDLGDCIGRDAREAIDRMFARKYNATHIKVGQPQYYLATGGFLIAYQPLLSNTLAELYVREYMREQDRKPRNATPAPLREAPSANASVERIKTTSSIEFARLQFTYNHIQRHVNDMLGRIAVAWCELQNHELTLWNEARKLNPNAIASATVGRRVSARMLGDVMAVSTCVPVAPDNVIVQNSMRVSSRPGTCYSRPLVSFRYEDQGPLIEGQLGENNELRLTRDALEPCTVGHRRYFIFGGGYVYFEEYAYSHQLSRADVTTVSTFIDLNITMLEDHEFVPLEVYTRHEIKDSGLLDYTEVQRRNQLHDLRFADIDTVIRADANAAMFAGLCAFFEGMGDLGRAVGKVVMGVVGGVVSAVSGVSSFMSNPFGALAVGLLVLAGLVAAFFAFRYVLQLQRNPMKALYPLTTKELKTSDPGGVGGEGEEGAEGGGFDEAKLAEAREMIRYMALVSAMERTEHKARKKGTSALLSSKVTNMVLRKRNKARYSPLHNEDEAGDEDEL

SEQ ID NO: 471 - protein, 642 aa, Human adenovirus
MALSINDCARLTGQTVPTMNYFLPLRNIWNRVREFPRASTTAAGITWMSRYIYGYHRTMLEDLAPGAPATERWPLYRQPPPHFLIGYQYLVRTCNDYIFDSRAYSRLKYHELARPGHQTVNWSVMANCSYTINTGAYHRFVDFDDFQTTLTQIQQAILAERVVADLALVQPQRGFGLTRMHGRAGEEEVPVERLMQDYYKDLARCQDHAWGMADRLRIQQAGPKDLVLLATIRRLRTAYFNFITSSIAPAHTPPPPEETVLSLPCDCDWLEAFVQRFSDPVDLETLRSLRGVPTGQLIRCIVSALSLPNGDPPGHLEMRGGVFTLRPREDGRAVTETMRRRRGETIERFIDRLPVRRRRRRPPPPPPPPEEEVEEMLVDEEEEVEELPGAFEREVRATIAELIRLLEEDLTVSARNSQFFNFAVDFYEAMERLEALGDVSEMPLRRWIMYFFVTEHIATTLNYLYQRLCNYAVFARHVELNLAQVVMRARDPEGAVVYSRVWNEAGMNAFSQLMGRISNDLAATVERAGRGDLQEEEIEQFMTEIAYQDNSGDVQEILRQAAVNDTEIDSVELSFRFKLTGPVAFTQRRQIQDVNRRVVAHASLLRAQYQNLPARGADVPLPPLPPGPEPPLPPGARPRRRF

SEQ ID NO: 472 - protein, 149 aa, Vaccinia virus
MTANFSTHVFSPQHCGCDRLTSIDDVKQCLTEYIYWSSYAYRNRQCAGQLYSTLLSFRDDAELVFIDIRELVKNMPWDDVKDCTEIIRCYIPDEQKTIREISAIIGLCAYAATYWGGEDHPTSNSLNALFVMLEMLNYVDYNIIFRRMN

SEQ ID NO: 473 - protein, 173 aa, Vaccinia virus
MSSSVDVDIYDAVRAFLLRHYYDKRFIVYGRSNAILHNIYRLFTRCAVIPFDDIVRTMPNESRVKQWVMDTLNGIMMNERDVSVSVGTGILFMEMFFDYNKNSINNQLMYDIINSVSIILANERYRSAFNDDGIYIRRNMINKLYGYASLTTIGTIAGGVCYYLLMHLVSLYK

SEQ ID NO: 474 - protein, 158 aa, Human papillomavirus
MARFEDPTRRPYKLPDLCTELNTSLQDIEITCVYCKTVLELTEVFEFAFKDLFVVYRDSIPHAACHKCIDFYSRIRELRHYSDSVYGDTLEKLTNTGLYNLLIRCLRCQKPLNPAEKLRHLNEKRRFHNIAGHYRGQCHSCCNRARQERLQRRRETQV

SEQ ID NO: 475 - protein, 152 aa, Molluscum contagiosum virus
MTMRLLVCAKHVTASWIHGIWRMSSHQIITRWAGAEPCALVLAHACCGAAQHAWISGNSSGCISARARVPAPGTIQRAGTRVRKIVPGTPEVSWDWRHVTTRHLAGPVSWRARERAVLRRAQHGELRLCLDGKGKVSTPKGLHLVPGTSSLF

SEQ ID NO: 476 - protein, 53 aa, Vaccinia virus
MISNYEPLLLLVITCCVLLFNFTISSKTKIDIIFAVQTIVFIWFIFHFVHSAI

SEQ ID NO: 477 - protein, 253 aa, Lake Victoria marburgvirus
MAELSTRYNLPANVTENSINLDLNSTARWIKEPSVGGWTVKWGNFVFHIPNTGMTLLHHLKSNFVVPEWQQTRNLFSHLFKNPKSTIIEPFLALRILLGVALKDQELQQSLIPGFRSIVHMLSEWLLLEVTSAIHISPNLLGIYLTSDMFKILMAGVKNFFNKMFTLHVVNDHGKPSSIEIKLTGQQIIITRVNMGFLVEVRRIDIEPCCGETVLSESVVFGLVAEAVLREHSQMEKGQPLNLTQYMNSKIAI

SEQ ID NO: 478 - protein, 830 aa, Human herpesvirus
MSKMAVLFLAVFLMNSVLMIYCDPDHYIRAGYNHKYPFRICSIAKGTDLMRFDRDISCSPYKSNAKMSEGFFIIYKTNIETYTFPVRTYKKELTFQSSYRDVGVVYFLDRTVMGLAMPVYEANLVNSHAQCYSAVAMKRPDGTVFSAFHEDNNKNNTLNLFPLNFKSITNKRFITTKEPYFARGPLWLYSTSTSLNCIVTEATAKAKYPFSYFALTTGEIVEGSPFFNGSNGKHFAEPLEKLTILENYTMIEDLMNGMNGATTLVRKIAFLEKADTLFSWEIKEENESVCMLKHWTTVTHGLRAETNETYHFISKELTAAFVAPKESLNLTDPKQTCIKNEFEKIINEVYMSDYNDTYSMNGSYQIFKTTGDLILIWQPLVQKSLMFLEQGSEKIRRRRDVGDVKSRHDILYVQLQYLYDTLKDYINDALGNLAESWCLDQKRTITMLHELSKISPSSIVSEVYGRPISAQLHGDVLAISKCIEVNQSSVQLHKSMRVVDAKGVRSETMCYNRPLVTFSFVNSTPEVVPGQLGLDNEILLGDHRTEECEIPSTKIFLSGNHAHVYTDYTHTNSTPIEDIEVLDAFIRLKIDPLENADFKVLDLYSPDELSRANVFDLENILREYNSYKSALYTIEAKIATNTPSYVNGINSFLQGLGAIGTGLGSVISVTAGALGDIVGGVVSFLKNPFGGGLMLILAIVVVVIIIVVFVRQRHVLSKPIDMMFPYATNPVTTVSSVTGTTVVKTPSVKDVDGGTSVAVSEKEEGMADVSGQVSDDEYSQEDALKMLKAIKSLDESYRRKPSSSESHASKPSLIDRIRYRGYKSVNVEEA

SEQ ID NO: 479 - protein, 171 aa, Human adenovirus
MEIWTVLEDFHKTRQLLENASNGVSYLWRFCFGGDLAKLVYRAKQDYREQFEDILRECPGLFDALNLGHQSHFNQRISRALDFTTPGRTTAAVAFFAFIFDKWSQETHFSRDYQLDFLAVALWRTWKCQRLNAISGYLPVQPLDTLRILSLQQQEDQEENPRAGLDPPAEE

SEQ ID NO: 480 - protein, 79 aa, Human herpesvirus
MQPMTKKKHTTASKRSPARPPSLSPPLESRRRVGGKSPERLHGNAPPTPPRSPLPPSPSPEHTRRLSPQRRRPQRQRKL

SEQ ID NO: 481 - protein, 257 aa, Vaccinia virus
MIPLLFILFYFANGIEWHKFETSEEIISTYLLDDVLYTGVNGAVYTFSNNKLNKTGLTNNNYITTSIKVEDADKDTLVCGTNNGNPKCWKIDGSDDPKHRGRGYAPYQNSKVTIISHNGCVLSDINISKEGIKRWRRFDGPCGYDLYTADNVIPKDGLRGAFVDKDGTYDKVYILFTDTIGSKRIVKIPYIAQMCLNDEGGPSSLSSHRWSTFLKVELECDIDGRSYRQIIHSRTIKTDNDTILYVFFDSPHYVPIL

SEQ ID NO: 482 - protein, 210 aa, Human papillomavirus
MKLKILLHSSTYSSSFDTEEQQLPGPSTSYSEVTEQASPTRRRKPRKSDATSTTSPETEGVRLRRRRREGKSGPGSGETPRKRRRGGGRGGGETELGSAPSPAEVGSRHRQVERQGLSRLGLLQAEARDPPMILLKGTANSLKCWRYRKVNSNCCNFLFMSTVWNWVGDCSHNHSRMLIAFDSTDQRDAFVKHNLFPKLCTYTYGSLNSL

SEQ ID NO: 483 - protein, 379 aa, Cercopithecine herpesvirus
MGSGVKDAEDPQGAPGNPCRPLACALALVRGLAHVWTQAAALGFVGSVVLPADARDESPLPGLLLAGVAGLGFAPTHAPRARAAARACAWVRLVAGCAAVTAWVSARGAAPARWFALAAAYAAAVALAEDVRPLFAAPRPLFLVSLGALAGGFAAGASARFWWTGDLGAAALSAALVAGLGASSARGRLAAACPAHRPGVGTGDEGAGASSGTTARDPEPARRRVRPEHIWIPLATFLVAAALAAEFARVHPEWAHAGAPRRWLEVFVLGHAAAGLTELCRALTPRDLTTPLLGVHVVLLFANHIASLFVPGPALYAMLGIAVWSSLAQVLGLHRRIREGGPGASGYATAAVRGLFLSVYVLGFAVGTAVLVPRGNTHA

SEQ ID NO: 484 - protein, 478 aa, Yaba monkey tumor virus
MSVCTEIDYKLYTELRKIAGNSLFLFNEDGDFVEVVSNSSFKFLLPVGLFSSMDIPLKKPIECNTDNDIEHSKNVVMPNLYPFQERVASEVLSSIKKKVELKRPMYVTLHLACGFGKTITTCYLLSVHKKKAVICLPNKMLINQWKRAIESININHLVSVDGVGNLLKELVKKPADILIIVSRHLSNKEFCKKIHVDYDVFVLDESHMYNLMNNSTVTRFLTYYPPKICYFLTATPRRVNRIYCNDVINVSNSSDLKKYIKIVEFFFETYSSDTIRQMVKKLNTNYNKYHMYTEKILAEDVPRNKLILDTIIYDFEKMIVNRLIIVTKLRKHMMFFYTNLIEKFGSDIVYLGDAKNKNISDIVKKIKSINRFIFISTTNYSGTGLDVPTLDSLVICSAVMNSMQIEQILGRICRYSISKTRTVIVFPNTSIKEIKHMIGFFTQKIITLAIEKLGFKKIDKKGNKQEFALCKAFNLQTR

SEQ ID NO: 485 - protein, 326 aa, Zaire ebolavirus
MRRVILPTAPPEYMEAIYPVRSNSTIARGGNSNTGFLTPESVNGDTPSNPLRPIADDTIDHASHTPGSVSSAFILEAMVNVISGPKVLMKQIPIWLPLGVADQKTYSFDSTTAAIMLASYTITHFGKATNPLVRVNRLGPGIPDHPLRLLRIGNQAFLQEFVLPPVQLPQYFTFDLTALKLITQPLPAATWTDDTPTGSNGALRPGISFHPKLRPILLPNKSGKKGNSADLTSPEKIQAIMTSLQDFKIVPIDPTKNIMGIEVPETLVHKLTGKKVTSKNGQPIIPVLLPKYIGLDPVAPGDLTMVITQDCDTCHSPASLPAVIEK

SEQ ID NO: 486 - protein, 882 aa, Human herpesvirus
MAAAGGERQLDGQKPGPPHLQQPGDRPAVPGRAEAFLNFTSMHGVQPILKRIRELSQQQLDGAQVPHLQWFRDVAALESPAGLPLREFPFAVYLITGNAGSGKSTCVQTINEVLDCVVTGATRIAAQNMYAKLSGAFLSRPINTIFHEFGFRGNHVQAQLGQYPYTLTSNPASLEDLQRRDLTYYWEVILDLTKRALAASGGEELRNEFRALAALERTLGLAEGALTRLAPATHGALPAFTRSNVIVIDEAGLLGRHLLTAVVYCWWMINALYHTPQYAARLRPVLVCVGSPTQTASLESTFEHQKLRCSVRQSENVLTYLICNRTLREYARLSYSWAIFINNKRCVEHEFGNLMKVLEYGLPITEEHMQFVDRFVVPENYITNPANLPGWTRLFSSHKEVSAYMAKLHAYLKVTREGEFVVFTLPVLTFVSVKEFDEYRRLTHQPGLTIEKWLTANASRITNYSQSQDQDAGHMRCEVHSKQQLVVARNDVTYVLNSQIAVTARLRKLVFGFSGTFRAFEAVLRDDSFVKTQGETSVEFAYRFLSRLIFSGLISFYNFLQRPGLDATQRTLAYARMGELTAEILSLRPKSSGVPTQASVMADAGAPGERAFDFKQLGPRDGGPDDFPDDDLDVIFAGLDEQQLDVFYCHYTPGEPETTAAVHTQFALLKRAFLGRFRILQELFGEAFEVAPFSTYVDNVIFRGCEMLTGSPRGGLMSVALQTDNYTLMGYTYARVFAFADELRRRHATANVAELLEEAPLPYVVLRDQHGFMSVVNTNISEFVESIDSTELAMAINADYGISSKLAMTITRSQGLSLDKVAICFTPGNLRLNSAYVAMSRTTSSEFLRMNLNPLRERHERDDVISEHILSALRDPNVVIVY

SEQ ID NO: 487 - protein, 174 aa, Human adenovirus
MGKITLVCGVLVAVLSILGLGSAAVVTEKADPCLTFNPDKCQLSFQPDGNRCAVLIKCGWECQSVAIQYKNKTRNNTLASTWQPGDPEWYTVSVPGADGFLRTVNNTFIFEHMCNTAMFMSRQYHMWPPRKENIVVFSIAYSLCTVLITAIVCLSIHMLIAIRPRNNAEKEKQP

SEQ ID NO: 488 - protein, 59 aa, Human herpesvirus
MSIRLRVCVGCVYVRVTVSLPAFNPMRNKIGECTQSHTMCLRAVLLTPHNKKKKHTSCP

SEQ ID NO: 489 - protein, 552 aa, Vaccinia virus
MTSLREFRKLCCDIYHASGYKEKSKLIRDFITDRDDKYLIIKLLLPGLDDRIYNMNDKQIIKLYSIIFKQSQEDMLQDLGYGYIGDTIRTFFKENTEIRPRDKSILTLEEVDSFLTTLSSVTKESHQIKLLTDIASVCTCNDLKCVVMLIDKDLKIKAGPRYVLNAISPHAYDVFRKSNNLKEIIENSSKQNLDSISISVMTPINPMLAESCDSVNKAFKKFPSGMFAEVKYDGERVQVHKNNNEFAFFSRNMKPVLSHKVDYLKEYIPKAFKKATSIVLDSEIVLVDEHNVPLPFGSLGIHKKKEYKNSNMCLFVFDCLYFDGFDMTDIPLYERRSFLKDVMVEIPNRIVFSELTNISNESQLTDVLDDALTRKLEGLVLKDINGVYEPGKRRWLKIKRDYLNEGSMADSADLVVLGAYYGKGAKGGIMAVFLMGCYDDESGKWKTVTKCSGHDDNTLRELQDQLKMIKINKDPKKIPEWLVVNKIYIPDFVVEDPKQSQIWEISGAEFTSSKSHTANGISIRFPRFTRIREDKTWKESTHLNDLVNLTKS

SEQ ID NO: 490 - protein, 146 aa, Human papillomavirus
MGPCNPTNIFLLCKDYEVDFEDLRLTCVFCKNELTTEELLAFALKELSIVWRHNWPFGVCAPCLAREVKVRELRHWDHSCYGPTVEQTTGRSLAELYIRCHACSKPLSIQEKEHQVQAYIHFHYIAGQWTGRCCQCRGPCTARWQP

SEQ ID NO: 491 - protein, 997 aa, Cercopithecine herpesvirus
MAEFRDLDNAPDNELPPTAIRHPRRFLYCDRASGVTVTTDGTSSCRITNSRFVQCGSHCAMVVDGAAAGPREAAGGTAIAMTSTDSDAAVVAFVTPPARGGAMVSIATQTDPSPPEPPATDPPSASDSGENAPAAPPLSEERPDDDGDQRRADPVVEQFWDADGEPPRPPSTFPVPLELNHKNAAAMARFLGDAGKRDPSLLLNYFCRCAREKEERRAKPQTFAAECELGYREIGYREFGLLRYAIYELQRMFVDVPPMSHKVWTSVAFVDYVTQLVNKFKPLVRRSDRLYRLLGMLVHLRIRARSVSFEAWMRCREVGLDDELVEQLRAHESQLVPFFEGLERGPTMRLMERGLQSALKYEEFYLKSIDAWALESVPQMYTRIAGHLACHSDLAGRVVFGRDSSWLEMFTYFFTRFYGHEIVPSTPAMLGLGTRRPYMSSCYLVNPQTTTTHSTLAAITQNVGPILARSGGIGLCLQEFNDARRGNASIMPTLKALDSLVAAYNNQSLRPTGVTVYLEPWHSDIMAVLRMKGVLAGEESRRCDNIFSALWMPDLFFKRLIRYLEGEKNVVWTLFTRRAGLSLSRFHGEEFETLYVRQEENGFGQAMPIQDLAYAIVRAAATTGSPFVMFKDAVNRHYIYDTQGSAIAGSNLCTEIVHPANATQSGVCNLASVNLAECVVGRTFDFNRLRDAVRACVLMVNIMIDRTAQPTPQCRRGHDRLRSMGIGMQGLHTACLKMGLDLASEEFRELNRHIAEVMLLAAMQTSNALCFHGARPFHEFKHSMFSAGRFHWEGFPDARPRYEGEWERLRQSMMKHGLRNSQFIALMPTVASAQIADVSEGFAPLFTNMFSKVTRDGETLRPNTLLLQELRETFSGRRLNEVIDGLDAKQWSVEQALPCLAADHPLRRFKTAFEYDQELLIDLCADRAPYVDHSQSLTLYVTERADGTLPASVLVRLLVHAYKRGLKTGMYYCKVRKATNSGVFGGDDNIVCTSCVL

SEQ ID NO: 492 - protein, 94 aa, Variola virus
MFVDDDSLIIYSTWPSTLSDSSGRVIVMPDNRSFTFKEGFKLDESIKSILLVNPSSIDLLKIRVYKHRIKWMGNIFVLFEQENIPPPFRLVNDK

SEQ ID NO: 493 - protein, 433 aa, Human cytomegalovirus
MDRKTRLSEPPTLALRLKPYKTAIQQLRSVIRALKENTTVTFLPTPSLILQTVRSHCVSKITFNSSCLYITDKSFQPKTINNSTPLLGNFMYLTSSKDLTKFYVQDISDLSAKISMCAPDFNMEFSSACVHGQDIVRESENSAVHVDLDFGVVADLLKWIGPHTRVKRNVKKAPCPTGTVQILVHAGPPAIKFILTNGSELEFTANNRVSFHGVKNMRINVQLKNFYQTLLNCAVTKLPCTLRIVTEHDTLLYVASRNGLFAVENFLTEEPFQRGDPFDKNYVGNSGKSRGGGGGSGSLSSLANAGGLHDDGPGLDNDIMNEPMGLGGLGGGGGGGGKKHDRGGGGGSGTRKMSSGGGGGDHDHGLSSKEKYEQHKITSYLTSKGGSGGGGGGGGGGLDRNSGNYFNDAKEESDSEDSVTFEFVPNTKKQKCG

SEQ ID NO: 494 - protein, 824 aa, Human herpesvirus
MSISSLFGGRYDNKFLLNMSSAPKIELIVDKVASLSERRLEGRLPEDWFRHIMDPETEFNGEFADALCIGIDEFAQPLPFLPFKALLVTGTAGAGKTNSIQTLAANLDCIVTATTSIAAQNLSVVLNRSKSAQVKTIFKTFGFNSSHVSMSERQSYIANDERSIQIQQKQDLSIYWNVISDIAERALGAVACKTKELPDLCESSVIVIDEAGVILRHILHTVVFFYWFYNALYKTPLYENGIVPCIVCVGSPTQSNALVTSFNPLTQNKDVKRGIDVLSALICDDVLSKYCEVDNNWIIFVNNKRCADHAFGDFLKHIEFGLPLKPELIEYVDQFVKPASYIRNPMNEIETTRLFLSHNEVKNYFRSLHEQVEVTNRNNLFVFPVYFLIKNKTFEDYKSEIGNFSLEIEPWFKSNIHRLNTYSQFADQDLSKTVQLEEIVLEDGSVEETLITCHLKHIRNSSIGVTSKIKASTVGFSGTYEKFVELLQSDLFIEKTSCEQTIHAYSFLSGLMFGGMYSFCCSEFTTPEVLMEIKNIKMPSIEFLESEMSRMSRDVQTVETDERYDFGLVDDGLSDMDLLEIDPCGDPFFTRYSKLPLTNSLSFEEISLLYTTFKDIFISRFAILQKHTKGKFGKTLLVTYNRNNVSRKQCGEIYSHLKSFYGMLTYAIPANNYTLEGYTNDNVVHLGTDKQLPQILYKKGLPRLVIKDEMGFISVLDNNVSKFVDVVNGQSFHLCTTVDYATVSKVSMTITKSQGLSIQKVAIDFGSDPKNLKLSSIYVGMSRVTDPNNLIMNVNPLRLNYENDNFIAPHIVKALKNENTMLIF

SEQ ID NO: 495 - protein, 142 aa, Human adenovirus
MSGNGSFEGGVFSPYLTGRLPSWAGVRQNVMGSTVDGRPVQPANSSTLTYATLSSSSVDAAAAAAAASAASAVRGMAMGAGYYGTLVANSSSTNNPASLNEEKLLLLMAQLEALTQRLGELTQQVAQLQEQTRAAVATVKSK

SEQ ID NO: 496 - protein, 124 aa, Vaccinia virus
MKRLETIRHMWSVVYDHFDIVNGKECCYVHTHSSNQNPIPSTVKTNLYMKTMGSCIQMDSMEALEYLSELKESGGWSPRPEMQEFEYPDGVEDTESIERLVEEFFNRSELQAGKLVKFGNSINC

SEQ ID NO: 497 - protein, 771 aa, Vaccinia virus
MFVIKRNGYKENVMFDKITSRIRKLCYGLNTDHIDPIKIAMKVIQGIYNGVTTVELDTLAAEIAATCTTQHPDYAILAARIAVSNLHKETKKLFSEVMEDLFNYVNPKNGKHSPIISSITMDIVNKYKDKLNSVIIYERDFSYNYFGFKTLEKSYLLKINNKIVERPQHMLMRVAVGIHQWDIDSAIETYNLLSEKWFTHASPTLFNAGTSRHQMSSCFLLNMIDDSIEGIYDTLKRCALISKMAGGIGLSISNIRASGSYISGTNGISNGIIPMLRVYNNTARYIDQGGNKRPGVMAIYLEPWHSDIMAFLDLKKNTGNEEHRTRDLFIALWIPDLFMKRVKDDGEWSLMCPDECPGLDNVWGDEFERLYTLYERERRYKSIIKARVVWKAIIESQIETGTPFILYKDACNKKSNQQNLGTIKCSNLCTEIIQYADANEVAVCNLASVALNMFVIDGRFDFLKLKDVVKVIVRNLNKIIDINYYPIPEAEISNKRHRPIGIGVQGLADAFILLNYPFDSLEAQDLNKKIFETIYYGALEASCELAEKEGPYDTYVGSYASNGILQYDLWNVVPSDLWNWEPLKDKIRTYGLRNSLLVAPMPTASTAQILGNNESVEPYTSNIYTRRVLSGEFQVVNPHLLRVLTERKLWNDEIKNRIMADGGSIQNTNLPEDIKRVYKTIWEIPQKTIIKMAADRGAFIDQSQSMNIHIADPSYSKLTSMHFYGWSLGLKTGMYYLRTKPASAPIQFTLDKDKIKPLVVCDSEICTSCSG

SEQ ID NO: 498 - protein, 823 aa, Rotavirus X
MSLRSLLITTEAVGETTQTSDHQTSFSTRTYNEINDRPSLRIEKDGEKAYCFKNLDPVRYDTRMGEYPFDYGGQSTENNQLQFDLFTKDLKADTDIDLSDDVKDDLKRQIMEYYQQGYRAIFLVRPQNQEQHYIASYSSTNLNFTSQPSIGVNLSILNKIQENKLYIYSTQPHIPSVGCEMIAKIFRTDIDNENSLINYSAPVTVTISVTKATFGDTFVCNHPNMNYQDLIPTMTKNSIYHDVKRITKIHEYINSKKKKKNSTSKIGGIQIAESKDGFWKILTKNYQIKLKFGVEGYGVMGGTFGNWLIDSGFKTVETNYEYQRNGKTINATTVASVKPSRKCGTRSPVFGQLQFSGEMMVLSHNDILTVFYTEREWALSNAIYAKNFATDFKRQFEITAQSDELLVRTNVVPHTIKNTPGKALMEYSHGGFGQIDTSDYTGMALTFRFRCISEDLPEGYYDRDKALAFANVGLTSFQDRQEANGTYWVYNTSTVGFGSCYPKKEFEYDINVTYTTLLPSDPEFTTGGTNYAQSVTAVLEESFINLQNQVNEMLTRMNISDLTSGVMSVFSVATSFPQILDGISDLLKAASSAFKKVKGKVGSVAKRLRGKRYVRLFDENVSIEETPRFLDSIRSSRRPSILSNMFNDDETFTALHTLASRTNSVASDVTYLQPIITTRIANSTPPVIAPASSVTYAKLKDISKIINAEIDPKSIMEFNQISNTISILDSTKKLAQYAVDPDIIDGILNKMVGGHARSLFSLKVRKHLLDAVEKDAFVKYNYHDLMGKLLNDRELLDITNNLSSQKQFELAKEFRDLLINALA

SEQ ID NO: 499 - protein, 308 aa, Molluscum contagiosum virus
MASLRPPFVHTMQPFRVLAAFSLESVSRVFTQDLAGAQPIPAADHDGLIPGHEVTRYCNVAPLLEQVRKHFHCTERVYPVSNTAKYQVFGVGQSLYSRRDDTRVCARLLVCLKAPSRGGGLVLKPDCHTRTTLTPRVGMAVLVSNLADYDVTAVTGGQMLLAVVELDIPRMRMHVSAQGDLLFAGSSVIFEQPSVRDVCFAFRLVVDEQTKDAVCEQLLHNGELYTVLQIVSSGERVPVRAQDPLALHHDIDFVPHARVSNKDEMLQRLATMMPPYAQAAKQVCVYGSPSYKVCTVYTIYGRLLGANV

SEQ ID NO: 500 - protein, 76 aa, Variola virus
MDSTNARSGMKSRKKKPKTTVIDEDDCMTCSVCQSKLVKISDITKVSLDYINTMRGNTLACTACGSSLKLLNDFAS

SEQ ID NO: 501 - protein, 366 aa, Human herpesvirus
MERGSRDHHRDHRDHREHRELREPPTLAFHMKSWKTINKPLKAFTKLLKENTTVTFTPQPSIIIQSAKNHLVQKLTIQAECLFLSDTEHFLTKTINNHIPLFESFMNIISNPEVTKLYIQHDSDLYTRVLVTASDTCTQASVPCVHGQEVVRDSGKSPLRIDLDHSTVSEVLKWLSPVTKTKRSGKSDAFMAHIIVQVNPPTIKFVTEMNELEFSNSNKVIFYDVNNMRFNLSAKNLQQALSMCAVIKTSCSLRTVAAKDCKLILTSKSTLLTVEAFLTQEQLKEESRFERMGKQDDGKGDRNHKNEDGSALASKQETQYKITNYMVPTKNGTAGSSLFNEKEDSESDDSMHFEYSSNPKRQRCVV

SEQ ID NO: 502 - protein, 315 aa, Vaccinia virus
MTRLPILLLLISLVYATPFPQTSKKIGDDATLSCNRNNTNDYVVMSAWYKEPNSIILLAAKSDVLYFDNYTKDKISYDSPYDDLVTTITIKSLTARDAGTYVCAFFMTSPTNDTDKVDYEEYSTELIVNTDSESTIDIILSGSTHSPETSSEKPDYIDNSNCSSVFEIATPEPITDNVEDHTDTVTYTSDSINTVSATSGESTTDETPEPITDKEEDHTVTDTVSYTTVSTSSGIVTTKSTTDDADLYDTYNDNDTVPSTTVGSSTTSISNYKTKDFVEIFGITALIILSAVAIFCITYYICNKRSRKYKTENKV

SEQ ID NO: 503 - protein, 257 aa, Human adenovirus
MRHLRDLPDEEIIIASGSEILELVVNAMMGDDHPEPPTPFETPSLHDLYDLEVDVPEDDPNEKAVNDLFSDAALLAAEEASSPSSDSDSSLHTPRHDRGEKEIPGLKWEKMDLRCYEECLPPSDDEDEQAIQNAASHGVQAVSESFALDCPPLPGHGCKSCEFHRINTGDKAVLCALCYMRAYNHCVYSPVSDADDETPTTESTLSPPEIGTSPSDNIVRPVPVRATGRRAAVECLDDLLQGGDEPLDLCTRKRPRH

SEQ ID NO: 504 - protein, 558 aa, Vaccinia virus
MDFFKKEILDWSVYLSLHYIARVCSNSSTSHIIQDYNLIRTYEKVDKTIVDFLSRLPNLFHILEYGENILHIYSMDDANTNIIIFFLDRVLNINKNGSFIHNLRLSSSINIKEYVYQLVNNDHPDNRIRLMLENGRRTRHFLSYISDTVNIYICILINHGFYIDAEDSYGCTLLHRCIYHYKKSESESYNELIKILLNNGSDVDKKDTYGNTPFILLCKHDINNVELFEICLENANIDSVDFNRYTPLHYVSCRNKYDFVKLLISKGANVNARNKFGTTPFYCGIIHGISLIKLYLESDTELEIDNEHIVRHLIIFDAVESLDYLLSRGVIDINYRTIYNETSIYDAVSYNAYNTLVYLLNRNGDFETITTSGCTCISEAVANNNKIIMEVLLSKRPSLKIMIQSMIAITKNKQHNADLLKMCIKYTACMTDYDTLIDVQSLQQYKWYILKCFDEIDIMKRCYIKNKTVFQLVFCIKDINTLMRYGKHPSFVKCTSLDVYGSRVRNIIASIRYRQRLISLLSKKLDAGDKWSCFPNEIKYKILENFNDNELSTYLKIL

SEQ ID NO: 505 - protein, 737 aa, Vaccinia virus
MISVTDIRRAFLDNECHTITKAFGYLHEDKAIALIKIGFHPTYLPKVLYNNVVEFVPEKLYLFKPRTVAPLDLISTITKLKNVDKFASHINYHKNSILITGDKSLIVKCMPYMIISDDDIRFIREQFVGTNSIEYILSFINKESIYRMSYQFSENEIVTIINRDHFMYEPIYEHQVLDSDFLKTMLDRYGIVPINSGIIDELCPEAIIEILMAVVRPRDAIRFLDIVNKNQLTEDSVKNYIINDIRRGKIDYYIPYVEDFLEDRTEDLGIYANIFFEDAIDITKLDITKTELEHISKYINYYTTYIDHIVNIILQNNYIDILASIIDYVQDVLTEELCIRIVCESTNPVPVTSLPIHSTLVMVMCIQMKYVDIVEFLDEIDIDTLIEKGADPITEYTFTTRWYNKHNDLITLYIKKYGFCPMMMKRLMFEYPLTKEASDHLLKTMDENRGAIMFFPRTICTLPYLLCCNYKLIQKPIPFKEENRNIVYKKNNRVLCFDSLENSAFKSLIKIDSIPGLKTYNMKDITYEKSNNIICVRFIPQESIHNEERRIKLQLFDIARLASYGLYYIPSRYLSSWTPVVNMIEGREYTNPQKIECLVILDLFSEEFIEYQNLGNAVSNKYELEYTISNYQAAINCLMSTLLIYLVLGSIRSISKTEDFVLSILNIFYKGLKINELLSEPVSGVCIELNKIKDRASSGNSSFIFLKKNELSKTLSLCEKVCVETILDNNQSFKSSK

SEQ ID NO: 506 - protein, 96 aa, Human immunodeficiency virus
MEQAPEDQGPQREPYNDWTLELLEELKNEAVRHFPRIWLHSLGQHIYETYGDTWTGVEALIRILQQLLFIHFRIGCRHSRIGIIQQRRTRNGASKS

SEQ ID NO: 507 - protein, 431 aa, Molluscum contagiosum virus
MPLGSKGMEPLTYRCFERLPFCALAQLRCLEQRVSYERQQPARAGVCREHRMAVGSAACGLVPLPSVLHVDRFMQLCLHSYGSVARSSRFATFSTLRHGDCVSRRAASAFSRDADSLLCVVMVCFENPEPAGHIGICVNTPRQDTRVYPLSGTVVACSATVAVTVSGGSALKIATLYYSISSRMYLLAPLEEAAGVVYVHSAILSRNACIFDNLLSPRVCFCVARYQRIDTDARANADGRADARANADGRADARANAGVDAGARAETNTYYRVFVDGEVYDMELGAALANQRLALDDCECCESELRAPARQGEHSELLDSQCAFRGYAEHSEALLFHFPGGRTAVLTRLARAEPSPVGEIFLQFPVPRVPLQAQASLRDLSDIVRVASDTLVDTTAACAGDSYAVSVRSGVRCLYSMRFLFGVITRLEWEN

SEQ ID NO: 508 - protein, 76 aa, Vaccinia virus
MSWYEKYNIVLNPPKRCSSACADNLTTILAEDGNHIRAILYSQPKKLKILQDFLATSRNKMFLYKILDDEIRRVLT

SEQ ID NO: 509 - protein, 751 aa, Colorado tick fever virus
MFTNKAILAVYQLPEECTLELVVRDGTGNLVNSCYVETFQHRGNIKFGDRQAQVISHFNQVIDLLRTSVSDSIDSMIRYVGEQGNDDTRALVVRAMNDFFPAKVGEAVFQAVQAALQGPGMLTTLMTRQLEFLGNTTLYNTRMLEAILHIVDTKRAPAQDVAPVDYINGPAKTPLWEPYVVQCPDLAPTGRVDVPDMHVTHNGQPLTTAWYPPPASLRPLLPDGTVGANPEPSAAGANFEPPSASSRNPDDGGSTPVDTVELRSATDVPENDHALRLLEEIARSHLPSHQQTHNMIVPQKDGAQGVVVTPDYAKSGCKVDMQPFHSYGGPNESHFAPMGIMLNYDKYDCGFVIPLEDPRHTDCNLWTEMPTMRDDFARQGRFWRYDLNVDHFRECIARHTHVYADGARLMGTFVFELVKGERWTLEICSYRDRQFRSALLARATPRLMHALGYGTNFGRFIIAMDPRMNLSDFPVDVMRPAEGRRPCVCQESRGAGPLMDELDFYFEKNWNELERRAQEGGEPKTLTRPTELIEALTALGKGTAFSLTPQKGSCVPTTMARMLRDRGADEWAVILEKMATSLALAAAKEGNPAEAFYRDMSSWTNDERSRAMQLITWKRLAINFGVKVSMRALGVRNGYRVSRAAIPKGVMALNNCELFGGGHVCPECHSVFQSAGERKMCTTLDLMFHQLFLLSTGDVWLGALVIHDPRSHVSKTMKGVNRGANGGVKYEEIRKVRQFMVKFPFGRTCPH

SEQ ID NO: 510 - protein, 873 aa, Human cytomegalovirus
MTAQPPLHHRHHPYTLFGTSCHLSWYGLLEASVPIVQCLFLDLGGGRAEPRLHTFVVRGDRLPPAEVRAVHRASYAALASAVTTDADERRRGLEQRSAVLARVLLEGSALIRVLARTFTPVQIQTDASGVEILEAAPALGVETTALSNALSLFHVAKLVVIGSYPEVHEPRVVTHAAERVSEEYGTHAHKKLRRGYYAYDLAMSFRVGTHKYVLERDDEAVLARLFEVREVCFLRTCLRLVTPVGFVAVAVTDEQCCLLLQSAWTHLYDVLFRGFAGQPPLRDYLGPDLFETGAARSFFFPGFPPVPVYAVHGLHTLMRETALDAAAEVLSWCGLPDIVGSAGKLEVEPCALSLGVPEDEWQVFGTEAGGGAVRLNATAFRERPAGGDRRWLLPPLPRDDGDGENNVVEVSSSTGGAHPPSDDATFTVHVRDATLHRVLIVDLVERVLAKCVRARDFNPYVRYSHRLHTYAVCEKFIENLRFRSRRAFWQIQSLLGYISEHVTSACASAGLLWVLSRGHREFYVYDGYSGHGPVSAEVCVRTVVDCYWRKLFGGDDPGPTCRVQESAPGVLLVWGDERLVGPFNFFYGNGGAGGSPLHGVVGGFAAGHCGGACCAGCVVTHRHSSGGGGSGVGDADHASGGGLDAAAGSGHNGGSDRVSPSTPPAALGGCCCAAGGDWLSAVGHVLGRLPALLRERVSVSELEAVYREILFRFVARRNDVDFWLLRFQPGENEVRPHAGVIDCAPFHGVWAEQGQIIVQSRDTALAADIGYGVYVDKAFAMLTACVEVWARELLSSSTASTTTCSSSSVLSSALPSVTSSSSGTATVSPPSCSSSSATWLEERDEWVRSLAVDAQHAAKRVASEGLRFFRLNA

SEQ ID NO: 511 - protein, 171 aa, Vaccinia virus
MDKKSLYKYLLLRSTGDMHKAKSPTIMTRVTNNVYLGNYKNAMDAPSSEVKFKYVLNLTMDKYTLPNSNINIIHIPLVDDTTTDISKYFDDVTAFLSKCDQRNEPVLVHCAAGVNRSGAMILAYLMSKNKESLPMLYFLYVYHSMRDLRGAFVENPSFKRQIIEKYVIDKN

SEQ ID NO: 512 - protein, 79 aa, Human herpesvirus
MRCSHNVNIGQRQPRKRPLQQQQQHQLQQQTRAGSRSVNSRISVAQRVLAVPTDYGRSPARDCGHFPLYHVRRKLIDGR

SEQ ID NO: 513 - protein, 333 aa, Vaccinia virus
MDVVSLDKPFMYFEEIDNELDYEPESANEVAKKLPYQGQLKLLLGELFFLSKLQRHGILDGATVVYIGSAPGTHIRYLRDHFYNLGVIIKWMLIDGRHHDPILNGLRDVTLVTRFVDEEYLRSIKKQLHPSKIILISDVRSKRGGNEPSTADLLSNYALQNVMISILNPVASSLKWRCPFPDQWIKDFYIPHGNKMLQPFAPSYSAEMRLLSIYTGENMRLTRVTKSDAVNYEKKMYYLNKIVRNKVVVNFDYPNQEYDYFHMYFMLRTVYCNKTFPTTKAKVLFLQQSIFRFLNIPTTSTEKVSHEPIQRKISSKNSMSKNRNSKRSVRGNK

SEQ ID NO: 514 - protein, 80 aa, Human immunodeficiency virus
MYILGLGIGALVVTFIIAVIVWTIVYIEYKKLVRQKKIDRLIERIGERAEDSGNESDGDTEELSKLMEMGHLNLGYVADL

SEQ ID NO: 515 - protein, 165 aa, Molluscum contagiosum virus
MENSADINDFLSGEDFSSYEEMGSDELTEPSEEGSASKPSEYKVDSRVDSRDDVETQSPPRQISERIADIKRRYTRRISLFEITGILCESFNLLQRGRLPLVSDLSDETFREEILHVVVREIEEGTCPVVIQKNGELLSVTDFDATGLRYHLDYIISIWKQQHRY

SEQ ID NO: 516 - protein, 146 aa, Variola virus
MNSLSIFFIVVATAAVCLLFIQGYSIYENYGNIKEFNATHAAFEYSKSIGGTPALDRRVQDVNDTISDVKQKWRCVAYPGNGFVSASIFGFQAEVGPNNTRSIRKFNTMAQCIDFTFSDVINIDIYNPCVAPNINNVECQFLKSVL

SEQ ID NO: 517 - protein, 332 aa, Rotavirus C
MVCTTLYTVCAILFILFIYILLFRKMFHLITDTLIVILILSNCVEWSQGQMFTDDIYYNGNVETIINSTDPFNVESLCIYFPNAVVGSQGPGKSDGHLNDGNYAQTIATLFETKGFPKGSIILKTYTQTSDFINSVEMTCSYNIVIIPDSPNDSESIEQIAEWILNVWRCDDMNLEIYTYEQIGINNLWAAFGSDCDISVCPLDTTSNGIGCSPASTETYEVVSNDTQLALINVVDNVRHRIQMNTAQCKLKNCIKGEARLNTALIRISTSSSFDNSLSPLNNGQTTRSFKINAKKWWTIFYTIIDYINTIVQAMTPRHRAIYPEGWMLRYA

SEQ ID NO: 518 - protein, 750 aa, Human herpesvirus
MDTADIVWVEESVSAITLYAVWLPPRAREYFHALVYFVCRNAAGEGRARFAEVSVTATELRDFYGSADVSVQAVVAAARAATTPAASPLEPLENPTLWRALYACVLAALERQTGPVALFAPLRIGSDPRTGLVVKVERASWGPPAAPRAALLVAEANIDIDPMALAARVAEHPDARLAWARLAAIRDTPQCASAASLTVNITTGTALFAREYQTLAFPPIKKEGAFGDLVEVCEVGLRPRGHPQRVTARVLLPRDYDYFVSAGEKFSAPALVALFRQWHTTVHAAPGALAPVFAFLGPEFEVRGGPVPYFAVLGFPGWPTFTVPATAESARDLVRGAAAAYAALLGAWPAVGARVVLPPRAWPGVASAAAGCLLPAVREAVARWHPATKIIQLLDPPAAVGPVWTARFCFPGLRAQLLAALADLGGSGLADPHGRTGLARLDALVVAAPSEPWAGAVLERLVPDTCNACPALRQLLGGVMAAVCLQIEETASSVKFAVCGGDGGAFWGVFNVDPQDADAASGVIEDARRAIETAVGAVLRANAVRLRHPLCLALEGVYTHAVAWSQAGVWFWNSRDNTDHLGGFPLRGPAYTTAAGVVRDTLRRVLGLTTACVPEEDALTARGLMEDACDRLILDAFNKRLDAEYWSVRVSPFEASDPLPPTAFRGGALLDAEHYWRRVVRVCPGGGESVGVPVDLYPRPLVLPPVDCAHHLREILREIELVFTGVLAGVWGEGGKFVYPFDDKMSFLFA

SEQ ID NO: 519 - protein, 207 aa, Human adenovirus
MSGSSEQELAAIVRDLGCGPYFLGTHDKRFPGFLAGNKLACAIVNTAGRETGGVHWLAFGWNPRSRTCYMFDPFGFSDRRLKQIYSFEYEAMLRRSALALSPDRCLSLEQSTQTVQGPDSAACGLFCCMFLHAFVHWPDRPMDGNPTMNLLTGVPNGMLQSPQVLPTLRRNQEKLYRFLAHHSPYFRSHRAAIEHATAFDKMKQLRV

SEQ ID NO: 520 - protein, 317 aa, Vaccinia virus
MKTISVVTLLCVLPAVVYSTCTVPTMNNAKLTSTETSFNNNQKVTFTCDQGYHSSDPNAVCETDKWKYENPCKKMCTVSDYISELYNKPLYEVNSTMTLSCNGETKYFRCEEKNGNTSWNDTVTCPNAECQPLQLEHGSCQPVKEKYSFGEYMTINCDVGYEVIGASYISCTANSWNVIPSCQQKCDIPSLSNGLISGSTFSIGGVIHLSCKSGFILTGSPSSTCIDGKWNPVLPICVRTNEEFDPVDDGPDDETDLSKLSKDVVQYEQEIESLEATYHIIIVALTIMGVIFLISVIVLVCSCDKNNDQYKFHKLLP

SEQ ID NO: 521 - protein, 218 aa, Vaccinia virus
MNSVTVSHAPYTITYHDDWEPVMSQLVEFYNEVASWLLRDETSPIPDKFFIQLKQPLRNKRVCVCGIDPYPKDGTGVPFESPNFTKKSIKEIASSISRLTGVIDYKGYNLNIIDGVIPWNYYLSCKLGETKSHAIYWDKISKLLLQHITKHVSVLYCLGKTDFSNIRAKLESPVTTIVGYHPAARDRQFEKDRSFEIINVLLELDNKAPINWAQGFIY

SEQ ID NO: 522 - protein, 364 aa, Zaire ebolavirus
MGVTGILQLPRDRFKRTSFFLWVIILFQRTFSIPLGVIHNSTLQVSDVDKLVCRDKLSSTNQLRSVGLNLEGNGVATDVPSATKRWGFRSGVPPKVVNYEAGEWAENCYNLEIKKPDGSECLPAAPDGIRGFPRCRYVHKVSGTGPCAGDFAFHKEGAFFLYDRLASTVIYRGTTFAEGVVAFLILPQAKKDFFSSHPLREPVNATEDPSSGYYSTTIRYQATGFGTNETEYLFEVDNLTYVQLESRFTPQFLLQLNETIYTSGKRSNTTGKLIWKVNPEIDTTIGEWAFWETKKTSLEKFAVKSCLSQLYQTEPKTSVVRVRRELLPTQGPTQQLKTTKSWLQKIPLQWFKCTVKEGKLQCRI

SEQ ID NO: 523 - protein, 233 aa, Molluscum contagiosum virus
MGPGGFPVITPLGRMHLRADMRTRVMCVDFGVTMDTLRVLGPYVVMVPMLEPASASLLAPRALRDCYVAAHGVLLHCSELAYLCAPMTRIFAVFRARRRYVLCCDDYDVLRTHVGGSAFSVRRFTDADFERVRVLELYNYNYCGEYQLVLLPSVRLLRQLQSCATYCLDDGHGWLAVDACECPLSRFRFALPSSPRANAPPATPPAAWPLERSQTPAETLLPPARPLEPPKLK

SEQ ID NO: 524 - protein, 141 aa, Yaba monkey tumor virus
MNPTSIVLIVIATVAVCLIIMQIYYIYENYDNIKEFNSTHSTLEYSKTINVFSLDRRIYDPNDHIYDVKQKWRCVNYKNNYVSVSVFGFKSNKDKNIKMFTTINDCINYTFSKSTHSDIYNPCILDDGFQNQDCIFLKSVI

SEQ ID NO: 525 - protein, 97 aa, Human immunodeficiency virus
MEQAPENQGPAKEPFNEWALELLEELKAEAVRHFPRPWLHALGQYIYETYGDTWVGVMAIIRILQQLLFTHYRIGCQHSRIGINPRGRGRRNGSSRS

SEQ ID NO: 526 - protein, 752 aa, Human herpesvirus
MEAPGIVWVEESVSAITLYAVWLPPRTRDCLHALLYLVCRDAAGEARARFAEVSVGSSDLQDFYGSPDVSAPGAVAAARAATAPAASPLEPLGDPTLWRALYACVLAALERQTGRWALFVPLRLGWDPQTGLVVRVERASWGPPAAPRAALLDVEAKVDVDPLALSARVAEHPGARLAWARLAAIRDSPQCASSASLAVTITTRTARFAREYTTLAFPPTRKEGAFADLVEVCEVGLRPRGHPQRVTARVLLPRGYDYFVSAGDGFSAPALVALFRQWHTTVHAAPGALAPVFAFLGPGFEVRGGPVQYFAVLGFPGWPTFTVPAAAAAESARDLVRGAAATHAACLGAWPAVGARVVLPPRAWPAVASEAAGRLLPAFREAVARWHPTATTIQLLDPPAAVGPVWTARFCFSGLQAQLLAALAGLGEAGLPEARGRAGLERLDALVAAAPSEPWARAVLERLVPDACDACPALRQLLGGVMAAVCLQIEQTASSVKFAVCGGTGAAFWGLFNVDPGDADAAHGAIQDARRALEASVRAVLSANGIRPRLAPSLAPEGVYTHVVTWSQTGAWFWNSRDDTDFLQGFPLRGAAYAAAAEVMRDALRRILRRPAAGPPEEAVCAARGVMEDACDRFVLDAFGRRLDAEYWSVLTPPGEADDPLPQTAFRGGALLDAEQYWRRVVRVCPGGGESVGVPVDLYPRPLVLPPVDCAHHLREILREIQLVFTGVLEGVWGEGGSFVYPFDEKIRFLFP

SEQ ID NO: 527 - protein, 65 aa, Human adenovirus
MALNDYHARGILTQSDVIFAGRRQELAVLLFNHTDQFLYVRKGHPVGTLLLKKVIFPSVKIATLV

SEQ ID NO: 528 - protein, 234 aa, Epstein-Barr virus
MAHARDKAGAVMAMILICETSLIWTSSGSSTASAGNVTGTTAVTTPSPSASGPSTNQSTTLTTTSAPITTTAILSTNTTTVTFTGTTVTPVPTTSNASTINVTTKVTAQNITATEAGTGTSTGVTSNVTTRSSSTTSATTRITNATTLAPTLSSKGTSNATKTTAELPTVPDERQPSLSYGLPLWTLVFVGLTFLMLILIFAAGLMMSAKNKPLDEALLTNAVTRDPSLYKGLV

SEQ ID NO: 529 - protein, 283 aa, Vaccinia virus
MESFKYCFDNDGKKWIIGNTLYSGNSILYKVRKNFTSSFYNYVMKIDHKSHKPLLSEIRFYISVLDPLTIDNWTRERGIKYLAIPDLYGIGETDDYMFFVIKNLGRVFAPKDTESVFEACVTMINTLEFIHSRGFTHGKIEPRNILIRNKRLSLIDYSRTNKLYKSGNSHIDYNEDMITSGNINYMCVDNHLGATVSRRGDLEMLGYCMIEWFGGKLPWKNESSIKVIKQKKEYKKIIATFFEDCFPEGNEPLELVRYIELVYTLDYSQTPNYDRLRKLFIQD

SEQ ID NO: 530 - protein, 535 aa, Human herpesvirus
MELLDHDIYKGPVRERVTYTIPNHPYLSLTVHHSRELDVDLKDITEEMIIDSGTLTAEDLFMTRGLRFCDDSVLWAALAEKVSVEFQRRGKTTMDLSAFMSLLERLTFEDETSVFYRLLTKCTALAHFSILEYIVDGEKRDTISAHFNRLLELLDSLFLQFLMLRNRSESNTLLTLFDILPNPKEIYGDAASPTSVLLKHFLSDHIFVAYASSYRFVSSVLCSCDQCRASLFRIYLGKKDSRAVHISDISEFDPADLILGQLHLDAREAVALRAEIDRDLGSSLILNSMERRHLPILHDKQLGRGHFERNILKVYCNIVLCLFLLRRVKQRIVSDLTAIARFFVKAISEMERCIDTVSGLRGVRIKLLVVSSQFEIKDPMRVPRLCFFFLEIVAILVSGYDKERHRVRALLEHLCLKKICLGDLCASMRLAREIRHDVLEGFLNTLELSYMSNPVRFFRFHDCNLYGTHMWSGVYPNVVPYAVRGGGSFDIRLQEHRRRQKRIVVRRRLIRRVQQRGLDIREARRVPKPACVTFI

SEQ ID NO: 531 - protein, 443 aa, Molluscum contagiosum virus
MAFSDSASADAPWSAVPAPRRDETTVLGDEIYFNYVYGQLELSDSWIPHVRMLRYFRNFSRAALLRIASTEYVNPSYFQQKDKRFAPVNNDFYHLSTGGYGIVFRVEEYVVKFVFEPGSQFHPMDLTSEYTVPRFLYNNLRGDERLLVVRALAMGLNYKIGFLYTLYKRVLHMVLLLARILDGQPLSLAYSRRQVAKLFAERKDSAKFVRLLSYFYPAVIKSNLNVINHFGHMIHFFEHEKRANYTYDRGNIIVFPLARCSAEKVTAANCAEFGFASVVHYVKFLFLQMALLYIKIYELSCHNFIHVDLKPDNILLFDSEREMRIHVGERSYVFREPVRSALNDFDFSQVSEIPNKKITASLRVEQNWFYDFHFFVHTLLKVYPELERDAAWSKALGEFLVCCNRNTCEKFRLRVRRLHPISFLVRFVARDLFSDWINGERRP

SEQ ID NO: 532 - protein, 185 aa, Vaccinia virus
MMTPENDEEQTSVFSATVYGDKIQGKNKRKRVIGLCIRISMVISLLSMITMSAFLIVRLNQCMSANEAAITDAAVAVAAASSTHRKVASSTTQYDHKESCNGLYYQGSCYILHSDYQLFSDAKANCTAESSTLPNKSDVLITWLIDYVEDTWGSDGNPITKTTSDYQDSDVSQEVRKYFCVKTMN

SEQ ID NO: 533 - protein, 294 aa, Human herpesvirus
MKKLTMESLLVYTFVMGVCFTSNLTCEQKIVLIQEQKLGAICISTCYVNGVLAGNSSCVSVRTSYLINLAMLTDGFKAMKVGNITSISEKTAFLRVIINYYFRGVMLRALIAKRLPNAAQLSSTVNCWLEGHSAGGVMTLFYGTERIVLKSSTEMNASQWTSDGPDANGTLNILNERVSLDSYFLSMICPQLSDEIYKKKVVHSKYFSLIKNDTMPKKFLRNTWKSAWTNWYKYKEIEALLDFSRDYENVSEITHSMSAAGLFFLAGGAFTMLLLLCCLSMITRKHVVKDLGYK

SEQ ID NO: 534 - protein, 662 aa, Human herpesvirus
MHLRGCACHLSLYCVYNDWENKIYRVPIFQCLFLEAETRSLKTFLIRGQSLDQESLNEIEVTRKETMLWDLQEQSNMMDKKIAAISNLIMNNGELVRTLSKFFVPLTVVLGDDGLEILEAYVCGEELMLPLDTVPVILRCIGDYAALDTKHLLSNECTQASKKIRFGYSVMDFHFSLTVSDVKICFSHTDTGEAVCEKMKQIFSFSVCAFGGEQVLLVTPKNAYALLFDDDLCLLLLQSVFAFLHEKIFGVYKQVLVQLCEYIGPDLWPFGNERSVSFIGYPNLWLLSVSDLERRVPDTTYICREILSFCGLAPILGPRGRHAVPVVRELSIEMPGSETSLQRFRFNSQYVSSESLCFQTGPEDTHLFFSDSDMYVVTLPDCLRLLLKSTVPKAFLPCFDENATEIDLLLKFMSRLQHRSYALFDAVIFMLDAFVSAFQRACTLMGMRWLLVRDLHMFYLTCDGKDTHVVMPLLQTAVENCWEKTTEIKQRPTFQCAEISRCGFIVYARFFLSSGLSQSKEAHWTVTASKYLSACIRTNKTGLCFASITVYFQDMMCVFIANRYNVSYWIEEFDPNDYCLEYHEGLLDCSRYTAVMSEDGQLVRQARGIALTDKINFSYYILVTLRVLRRWVESKFEDVEQTQFIRWENRMLCEHIHLLHLN

SEQ ID NO: 535 - protein, 129 aa, Human adenovirus
MQTLLILLFLLSPALATFNYSKCKFVELWNFLNCYNAKMDMPYYYLVIVGIVMVCSCTFFAIIIYPCFNLGWNSIQAFAYTLESSSLASTPPPTPPPRRNQFPMIQYLEEPPPRPPSTVSYFHITGGND

SEQ ID NO: 536 - protein, 148 aa, Epstein-Barr virus
MCPPVRQRPAQAPPAKRQALETVPHPQNRGRLMSPKARPPKMQRRPRPPVAKRRRFPRSPQQVERPILPPVESTPQDMEPGQVQSPPQITAVIQLRQERDTMRPPIYLPALLANCGPAGLLRAHRLPQPKPPCLSRQRPSPDSQTSPC

SEQ ID NO: 537 - protein, 161 aa, Vaccinia virus
MSSFVTNGYLPVTLEPHELTLDIKTNIRNAVYKTYLHREISGKMAKKIEIREDVELPLGEIVNNSVVINVPCVITYAYYHVGDIVRGTLNIEDESNVTIQCGDLICKLSRDSGTVSFSDSKYCFFRNGNAYDNGSEVTAVLMEAQQGIESSFVFLANIVDS

SEQ ID NO: 538 - protein, 455 aa, Human herpesvirus
MESCYVVWSSYFLQLKLTAPILLKPREIRCLRTGLSILSQQSTFVCMCRDEGSFTAAYFTYIDLRDCGNVTLAVQNISDVDLDLKQFPLIINLFAFFLPSINLVSLPVQIVERMEHNYIPHGECRAQFILYGSQTKLRAHIKRIRWTELQHEEPTHYMYACEFWIDLQTTPPDQIFNSAKVEFISSRNVYFKQIMLHEKILVIRASYENNYLLNPDNFPSDIFFQVNFIQTIPHIVMERNQEPVMTYDGTCITVGSTKNINSNTTDPFSCTFPTFFDSKQKFAGLFIPRLINGISLNTFTWKERTHLQVTMRAYKKNCRIDYSQELGKLIFLPSQIVTHDQSNIDFGWTETSRILISNQNNQISVFRSETTPVADSPVLSTVPNITAATNVSINLNSLHLNIAKEHLVPVRYRMRTDNLRTFLPITALPHTLTVLEGNIGLQTVPCPSGNRDINA

SEQ ID NO: 539 - protein, 783 aa, Molluscum contagiosum virus
MLYVYPASVRRAIACLLRCNLDISRLSSAHARVLLEYGMHGDLPVALYEHAVALDPHAVVFFPPAAVRVRDLQRALCEAPELGPPLLRAVHFHKRALLRDGDGAVLRKLLETNAVNDDDVSYLIRERCVSPASIVKLNPRLATRSMRFSPQELEDIFRSVQSERWEELYERLDLVLRDILWLAARAAVPPLHAALQRLEDTRACLTLVMRFPHARVLDFVSPLVKYERGFVRALDNFVAAQLPAVWPDINRFLFRAVPKPQLLRRYGVKFHAMFSFACEPFPDVDASALSAQDAAFVEAHIHTYDQLSRAFSLRFRQHVQRTQNRVLTMLVGDTRRPPARPRRSSSVEDLLQHLDHVYESRTPRLARRDLEGMLSAHRYDVSLCKRVLMADASTRVKKKVLRIMRGWKACGTLAHLSYTKVTQSTILLDIFTHLVVRIFHSQRELLAALDKNSDALFRRLPLCQCARCAELRTLRAHDAPALRSRIFAGAPVDALASARPLPRADATPTSLETAGERAGANTPVANPDTDAERLRTGANERQHAAQSPGARSRVPFDGRERRAPSDARERHAPSDALAARIPLRALANEATDECLLAAVHDLAVLAAHGVVDTRFVPASSWGPLAGMLRGLGTIDVRSVRDALTHSVLHAANLGAGGVRSAHFMVHVRHVNAYRFTDYDTVLRFGEAYVRVVLFFNFLLEYLFVVSLYRLVVMRAHWRFREFVSKMINCFLEGFGVCFCAMRVNDCVDNELAEYMQDNGAPFHTYHLYAKVILVILEHLNGTR

SEQ ID NO: 540 - protein, 218 aa, Variola virus
MYSLVFVILMCIPFSFQTVYDDKSVCDSDNKEYMGIEVYVEATLDEPLRQTTCESEIHKYGASVSNGGLNISVDLLNCFLNFHTVGVYTNRDTVYAKFTSLDPWTMEPINSMTYDDLVKLTEECIVDIYLKCEVDKTKDFIKTNGNRLKPRDFKTVPPNVGSIIELQSDYCVNDVTAYVKIYDECGNIKQHSIPTLRDYFTTTNGQPRKILKKKFDNC

SEQ ID NO: 541 - protein, 430 aa, Human herpesvirus
MWTILLFCVPVIYGELYPDFCPLAVVDFDVNATVDDLLLFDISLSKQCSDDKIRHSAVAAMTDNAFFFGNSETQIETDFGKYLAFNCYQVFSTLNHFLFKNFKKTKGLMKRYDKLCLDVESYIHIQIICSPFKSFIRLRRMNETGISPRILETTFYLQNKRNSTWVAIKNYLGEDDPFTYRIWHTLTHAKNFLINSCENDFNQLFFWQRKYLSLAKTFEATFKQGFNPMIEQRNEQRYRTNNIDCSFSKFRQNGVKVAVCKYTGWGVSGFGSLEVLQKIKSPFGEEWKRVGFNSTGAFTPLYGSDVLWGLIFLRVEMTTYVCTCTNKNTGTQIQVTLPDVDLDLLDSEKTSSNVFVDMLCYTLIAILFLAFVTAVVLLGVSCLDGVQKVLTWPLQHIQKEPVSEKIINLTNLMFGQEPLPKKESLKQQCL

SEQ ID NO: 542 - protein, 662 aa, Human herpesvirus
MHLRGCACHLSLYCVYNDWENKIYRVPIFQCLFLEAETRSLKTFLIRGQSLDQESLNEIEVTRKETMLWDLQEQSNMMDKKIAAISSLIMNNGELLRKLSKFFVPLTVVLGDDGLEILEAYVCGEEPMLPLDTVPVILRCVGDYAALDTKHLLSNECTQASKKLRFGYSVMDFHFSLTVSDVKICFSHTDTGEAVCEKMKQIFYFSVCAFGGEQVLLVTPKNAYALLFDDDLCLLLLQSVFAFLHEKIFAVYKQVLVQLCEYIGPDLWPFGNERSVSFIGYPNLWLLSVSDLERRVPDTTYICREILSFCGLAPILGPRGRHAIPVIRELSVEMPGSETSLQRFRFNSQYVSSESLCFQTGPEDTHLFFSDSDMYVVTLPDCLRLLLKSTVPRAFLPCFDENATEIELLLKFMSRLQHRSYALFDAVIFMLDAFVSAFQRACTLMEMRWLLVRDLHVFYLTCDGKDSHVVMPLLQTAVENCWEKITEIKQRPAFQCMEISRCGFVFYARFFLSSGLSQSKEAHWTVTASKYLSACIRANKTGLCFASITVYFQDMMCVFIANRYNVSYWIEEFDPNDYCLEYHEGLLDCSRYTAVMSEDGQLVRQARGIALTDKINFSYYILVTLRVLRRWVESKFEDVEQAEFIRWENRMLYEHIHLLHLN

SEQ ID NO: 543 - protein, 182 aa, Human adenovirus
MDVWSILGEFNKTRRLVEDSSDGCSGFWRHWFGTPLSRLVYTVKKDYSEEFENLFADCSGLLDSLNFGHQSLFQERVLHSLDFSSPGRTTAGVAFVVFLVDKWSQDTQLSRGYILDFAAMHLWRAWMRQRGQRILNYWLLQPAASGLLHLHRQTSMLEEEMREAMDKNPRSGLDPPSEEELD

SEQ ID NO: 544 - protein, 148 aa, Epstein-Barr virus
MCPPVRQHPAQAPPAKRQALETVPHPQNRGRLMSPKARPPKMQRRPRPPVAKRRRFPRSPQQVERPILPPVESTPQDMEPGQVQSPPQITAVIQLRQDRDTMRPPIYLPALLANCGPAGLLRAHRLPQPKPPCQSRQRPSPDSQTSPC

SEQ ID NO: 545 - protein, 252 aa, Vaccinia virus
MGNKNIKPSKENRLSILSKDKMDSFKRGSWATSSFKEKSRATIQRFSSLRREHIKVDHPDKFLELKREIYEIIQKSSSIDVDKRTKLMSNIKTMMINPFMIEGLMTSLENLDPDNKMSYSSVMILGEFDIINISDNEAAFEFINSLLKSLLLLNTRQLKLLEYSISNDLLYAHINALEYIIKNTFNVPERQLILRGQYLTPIFSDLLKYAGLTIKSNILMWNKQFIKPVSDLYTSIRLLYCVTESYKVIGMG

SEQ ID NO: 546 - protein, 432 aa, Human herpesvirus
MFSPQLNHVLQLVFDCNHIVSNSYQEIILKCRISSTKPGILFITDGTESETEDVLFDVQFLEKTTTIKIKILPISRTVPVRIHLFSIPIYLPSHALEIDDINALCQKENIDPTVYEQYGLTNMPISTTNVINQFKVVQNDSVEMSLILFNLNWTESPYQSQKLDRYGRKLLIVFSVFSIDTRECPYWENLFKSIIPLCRVNMISEPGISIYKIEFNDPFLTVFLRNVVLPENKRRFPITKECYLRLTFSPPDRSTVTLNMNMPYFKICADGKNLEVFFPNDMSLVSNTNKEITLRGEFTNKKIVGIFIPVQTHVFKLYPFLWFAQEPLKLRISCERTVSVTEHDMLGRVFFVTKKLFRKPFRSLSNSDMKSLLTHTENTDKPFDVHFMGNCFPAYLLPELTLHPLEYEDKPARGNPQTLPSVEKHSIIKIRI

SEQ ID NO: 547 - protein, 114 aa, Molluscum contagiosum virus
MLLLLMVLMFFLFILSKKAVPLLSVPEWATRPRYDEESQRRLARLRLDALYARDELAQLDERLAEARARAFERARMTPADARLRPIPAADAPLRMHPYKALRMGYELARGLRLL

SEQ ID NO: 548 - protein, 62 aa, Variola virus
MDSFSSLFMKLCCISTDKTGSKKSDRKNKNKIKDYMEHDYYKITIVPGSSSTSTSSWYYTHA

SEQ ID NO: 549 - protein, 503 aa, Human herpesvirus
MEIVTYKTASARSPTVTWSSGFGRAIASIQKRHQENIRKPLRFYSGLLHCLIKQYEHCLVPPNKSIRFDKGKIEVAALILDLGHQVLGRQIHVRQRIYSWTSITLPKLFTPRELYFLVASPEDEDIVFNPTITKGGWISGSFSYPVEYRSNFSLTGMSANVLMVPFVPYRYPLNYARFISSIDLMILNEQFPEHECGDIQILKQRNYLYLGVIKNLTWKKSVTGTGQTAPHRILKASFIGSWPDTSLPDRVALRFFNNTRFTIHCHEFAINIENLGLVKNKEKVFGTLATVCCEQIPSLLTTENLPRYLIVQFEVVTQIEDPEPLLFSSNPKLYFTGDVLNATMQLQHNPNYYDLLVHAPYDIHFYPSRCHIVILPIRYFTRGDKQILISGYQNEGFFETQVMLWAPGTPLHITLRSFSPNLILPQSTPIATLFYVERMTSQNTEQKDVIAKLSENGHFIGNLKLPRENFLHHDAITDLSLAAIPKDSATPGPGTVSSSVSPS

SEQ ID NO: 550 - protein, 565 aa, Parainfluenza virus
MVAEDAPVRATCRVLFRTTTLIFLCTLLALSISILYESLITQKQIMSQAGSTGSNSGLGSITDLLNNILSVANQIIYNSAVALPLQLDTLESTLLTAIKSLQTSDKLEQNCSWSAALINDNRYINGINQFYFSIAEGRNLTLGPLLNMPSFIPTATTPEGCTRIPSFSLTKTHWCYTHNVILNGCQDHVSSNQFVSMGIIEPTSAGFPFFRTLKTLYLSDGVNRKSCSISTVPGGCMMYCFVSTQPERDDYFSAAPPEQRIIIMYYNDTIVERIINPPGVLDVWATLNPGTGSGVYYLGWVLFPIYGGVIKGTSLWNNQANKYFIPQMVAALCSQNQATQVQNAKSSYYSSWFGNRMIQSGILACPLRQDLTNECLVLPFSNDQVLMGAEGRLYMYGDSVYYYQRSNSWWPMTMLYKVTITFTNGQPSAISAQNVPTQQVPRPGTGDCSATNRCPGFCLTGVYADAWLLTNPSSTSTFGSEATFTGSYLNTATQRINPTMYIANNTQIISSQQFGSSGQEAAYGHTTCFRDTGSVMVYCIYIIELSSSLLGQFQIVPFIRQVTLS

SEQ ID NO: 551 - protein, 448 aa, Human adenovirus
METRGRRPCPFQHQQDESQAHPCKRPARGPPLHRDGDHPHADPETLEGHDAGCAGRPSSCALQSQSSQPPKRGSLLDPDAVEHVTELWDRLELLSHTLAKMPMADGLKPLKNFASLQELLSLGGDRLLSELVRENLQVRDMLNQVAPLLRDDGSCISLNYHLQPVIGVIYGPTGCGKSQLLRNLLSSQLITPAPETIFFIAPQVDMIPPSEMKAWEMQICEGNFAPGPEGTIVPQSGTLRPKFIKMSYDDLTQEHNYDVSDPRNVFAKAAAHGPIAIIMDECMENLGGHKGVSKFFHAFPSKLHDKFPKCTGYTVLVVLHNMNPRRDLGGNIANLKIQAKLHIISPRMHPSQLNRFANTYTKGLPVAISLLLKDIIQHHAQRPCYDWIIYNTTPEHEAMQWCYLHPRDGLMPMYLNIQSHLYRVLEKIHRTLNDRERWTRAYRARKNK

SEQ ID NO: 552 - protein, 148 aa, Epstein-Barr virus
MCPPVRQRPAQAPPAKRQALETVPHPQNRGRLMSPKARPPKMQRRPRPPVAKRRRFPRSPQQVERPILPPVESTPQDMEPGQVQSPPQITAVIQLRQERDTMRPPIYLPALLANCGPAGLLRAHRLPQPKPPCQSRQRPSPDSQTSPC

SEQ ID NO: 553 - protein, 312 aa, Vaccinia virus
MAEFEDQLVFNSISARALKAYFTAKINEMVDELVTRKCPQKKKSQAKKPEVRIPVDLVKSSFVKKFGLCNYGGILISLINSLVENNFFTKDGKLDDTGKKELVLTDVEKRILNTIDKSSPLYIDISDVKVLAARLKRSATQFNFNGHTYHLENDKIEDLINQLVKDESIQLDEKSSIKDSMYVIPDELIDVLKTRLFRSPQVKDNIISRTRLYDYFTRVTKRDESSIYVILKDPRIASILSLETVKMGAFMYTKHSMLTNAISSRVDRYSKKFQESFYEDIAEFVKENERVNVSRVVECLTVPNITISSNAE

SEQ ID NO: 554 - protein, 492 aa, Human herpesvirus
MLFKNTLAYYNFSITYTQDYKNTPRLNTRVLHPSCKITSSLKKTQYLKSKVKHKMFFCTNMYSPQLNHVLQLVFDCNHIVPNSYQEITLKCRISSTKPGILFITDGTESETEDVLFDVQFLENTMTIKIKILPISRTVPVRIHLFSIPIYLPSPALEIDDINALCQKENIDPIVYEQYGLTNMPISTTNVINQFKVVSNDSVETSLILLNLSWTESPYQSQKLDRYGRKLLIVFSVFSIDTRKCSYWKNLFKSMIPLCRVNMISEPGISIYKIEFNDPFLTIFLRNVVLPENERRFPITKECYLRLTFSPPNRSTVTLNMNMPYFKICADGKSLEVFFPSDMSLVINTNKEITLRGKFTNKKIVGIFIPVQTHVFKLYPFLWFAQEPLKLRISCEKTVSVTEHDMLGRIFFVTKKLFRKPFRSLSNSDMKSLLTHTENTDKPFEVHFMGNCFPAYLLPELTLHPLEYEDKPARGNPQILPSVEKHSIIKMRI

SEQ ID NO: 555 - protein, 663 aa, Molluscum contagiosum virus
MRRLLGISCMTARASDTDEVRATLQKQPCSEVYARLPCGRGVVVNADTFQSTARLCALQSARVLAACPVREMPSPPAPALVMAALETDSFFSPQSSATPLAKILFHRASGEDNEDLLRALLQPGEPPGLSLTDINWWLQTRGLGRYCFMTLSTFRARELPRGSLTLIDDMVVGCLGYHAIWVKDPERYTRPEIDIHRYDVQAVAAPENWAPLRARTARAPMRAMLLYARASTGCTPPEPYMISVYPEGRVFFDADSGTGVIADFLHWLLSVFTEQERRLYLVGFLSSCYDLPLLRAYWPRADTGWRLLGHALVYRCRYTAVLLDAAPYAHGLCLREYCEHWAGASPRLPSEMESRADVLRRASASTEAAVHAARLLGTAVCAQQELLRRVMPTCDFAHFPDLSSMAIANAALLGACAHDARLFDPVQPDAVAFVRESMLHEHVGSLPRDAPGTRLHTMHVRSVIQHLARELYPTGKPYYTQTLNPGRLALALCKVRRRGNLQIPFLFSKRDPDALAFDAVLTSVDVNNAVRMGGYQIQVQGALEWERSEPVLAQGVQELLAAADAEGAAAADLVAWVARTPHLLQAHLAEYGPASGLLLAAFAVSYCRAQVHKVIAEVDNHYYSSHVRAHSYNCICVPPALSSVLPELDWGSALAVLSEPLEY

SEQ ID NO: 556 - protein, 263 aa, Vaccinia virus
MEIFPVFGISKISNFIANNDCRYYIDTEHQKIISDEINRQMDETVLLTNILSVEVVNDNEMYHLIPHRLSTIILCISSVGGCVISIDNDVNGKNILTFPIDHAVIISPLSKCVVVSKGPTTILVVKADIPSKRLVTSFTNDILYVNNLSLINYLPLSVFIIRRVTDYLDRHICDQIFANNKWYSIITIDNKQFPIPSNCIGMSSAKYINSSIEQDTLIHVCNLEHPFDLVYKKMQSYNSVPIKEQILYGRIDNINMSISISVY

SEQ ID NO: 557 - protein, 214 aa, Human cytomegalovirus
MLRLLLRHHFHCLLLCAVWATPCLASPWSTLTANQNPSPPWSKLTYSKPHDAATFYCPFLYPSPPRSPLQFSGFQRVSTGPECRNETLYLLYNREGQTLVERSSTWVKKVIWYLSGRNQTILQRMPRTASKPSDGNVQISVEDAKIFGAHMVPKQTKLLRFVVNDGTRYQMCVMKLESWAHVFRDYSVSFQVRLTFTEANNQTYTFCTHPNLIV

SEQ ID NO: 558 - protein, 539 aa, Human metapneumovirus
MSWKVVIIFSLLITPQHGLKESYLEESCSTITEGYLSVLRTGWYTNVFTLEVGDVENLTCSDGPSLIKTELDLTKSALRELKTVSADQLAREEQIENPRQSRFVLGAIALGVATAAAVTAGVAIAKTIRLESEVTAIKNALKTTNEAVSTLGNGVRVLATAVRELKDFVSKNLTRAINKNKCDIDDLKMAVSFSQFNRRFLNVVRQFSDNAGITPAISLDLMTDAELARAVSNMPTSAGQIKLMLENRAMVRRKGFGILIGVYGSSVIYMVQLPIFGVIDTPCWIVKAAPSCSGKKGNYACLLREDQGWYCQNAGSTVYYPNEKDCETRGDHVFCDTAAGINVAEQSKECNINISTTNYPCKVSTGRHPISMVALSPLGALVACYKGVSCSIGSNRVGIIKQLNKGCSYITNQDADTVTIDNTVYQLSKVEGEQHVIKGRPVSSSFDPIKFPEDQFNVALDQVFENIENSQALVDQSNRILSSAEKGNTGFIIVIILIAVLGSSMILVSIFIIIKKTKKPTGAPPELSGVTNNGFIPHS

SEQ ID NO: 559 - protein, 130 aa, Human adenovirus
MLQRRGVSYHIVVPGVLVTYLEDFSITNMIKEKLPRFITHILEGITGDTKRAYSSMQFLGASFGALKYSLTLASPTLSPGSELSAVVAQDLSDFLQLTLRRQLRAEGRTLLNVVVLNTLQVVEQQDLFLL

SEQ ID NO: 560 - protein, 162 aa, Epstein-Barr virus
MSAPRKVRLPSVKAVDMSMEDMAARLARLESENKALKQQVLRGGACASSTSVPSAPVPPPEPLTARQREVMITQATGRLASQAMKKIEDKVRKSVDGVTTRNEMENILQNLTLRIQVSMLGAKGQPSPGEGTRPRESNDPNATRRARSRSRGREAKKVQISD

SEQ ID NO: 561 - protein, 155 aa, Vaccinia virus
METIKALEKFMEFDRLQKDCSDKLDRERERRMKAEREIARKNCGGNPCERELESERSNVKRLEYQLDAEKEKVKFYKRELERDRYLSSRYLTSSSDPHEKPLPNYTFPRIKNVSPLTTEATGSVEVVPPSSTDVTKPISDVTPSVDVEPEHPPAF

SEQ ID NO: 562 - protein, 444 aa, Human herpesvirus
MVKDLKFMDNFNEKWQCITKLAFLGLYAGASLFNFTSKPTLGYWCRYLSEYASMLLFQFESKLKELTKESTRQLGGYNLCHWGQELKDCLENKSDVFFRYDFFERIESCLIEHFMLLCGCVECRRMFIMYNKRGRKFDFGHSVRIQCFPMIGSIRLPAFLHLGEPYDVSLSSLIAKDLGLSMIEGQIELSRLPISLQISVTPDKKALLTFLTNIVFIVFVVNTLYRVINAELDIYYDLFTEEVGKLCVAMEEEMKLGRNGCLGDLCYFSPMKQMKEIVRCPGEKSQFILKCWEALRIGFSVPAYKDYDETPFMEMFFMHHLHIKRFHEDNDRDLVSCDNLIPGFFIVNTDGENFLQRLQRVVLPVVEDYLTNTRCINGTMAFFFSGLKYFGSGNHRGFQISPEKDVRAIAYKLGSLDVLRDDYKYYEYTPPDCPGELNGHGGDE

SEQ ID NO: 563 - protein, 213 aa, Molluscum contagiosum virus
MASAALSTLYGAFVARYLRKLSLYSTTNSVTCAIHVGRIVGTLQNCSVRILNRCNNNDQLSFRLLLEAFAETVNLLPPKQRAEIAAQVGVDLEAASHEESRLERKCRAHAALVQSIDVQTLNVGTCIAPPGRSLAIQVVNSGSAAANCGLEAIIRSLSQRPAFVPVDARRALCPGALARLLAAAAAVLLALLALAALRRRLRLRYQYATDLYV

SEQ ID NO: 564 - protein, 271 aa, Variola virus
MDFFNKFSQGLAESSTPKSSIYYSEEKDLDIKKDEAIEIGLKSQESYYQRQLREQLARDNMMAASRQPIQPLQPTIHITPLQVPTPAPTPKPRQQQTNTSSDMSNLFDWLSADDNTQPSSLLPALTPINAVQDIISKFNKDQKTTTTPSTQPSQTLPTTTCTQQSDGSISCTTPTVTPPQPPIVATVCTPTPTGGTVCTTAQQNPNPGATSQQNLDNMALKDLMSSVEKDMRQLQAETNDLVTNVYDAREYTRRAIDQILQLVKGFERFQK

SEQ ID NO: 565 - protein, 76 aa, Human cytomegalovirus
MCMMSHNKAFFLSLQHAAVSGVAVCLSVRRGAGSVPAGNRGKKTIITEYRITGTRALARCPTKPVTSMWNSSWTSR

SEQ ID NO: 566 - protein, 574 aa, Human respiratory syncytial virus
MELLIHRLSAIFLTLAINALYLTSSQNITEEFYQSTCSAVSRGYFSALRTGWYTSVITIELSNIKETKCNGTDTKVKLIKQELDKYKNAVTELQLLMQNTPAANNRARREAPQYMNYTINTTKNLNVSISKKRKRRFLGFLLGVGSAIASGIAVSKVLHLEGEVNKIKNALLSTNKAVVSLSNGVSVLTSKVLDLKNYINNQLLPIVNQQSCRISNIETVIEFQQKNSRLLEINREFSVNAGVTTPLSTYMLTNSELLSLINDMPITNDQKKLMSSNVQIVRQQSYSIMSIIKEEVLAYVVQLPIYGVIDTPCWKLHTSPLCTTNIKEGSNICLTRTDRGWYCDNAGSVSFFPQADTCKVQSNRVFCDTMNSLTLPSEVSLCNTDIFNSKYDCKIMTSKTDISSSVITSLGAIVSCYGKTKCTASNKNRGIIKTFSNGCDYVSNKGVDTVSVGNTLYYVNKLEGKNLYVKGEPIINYYDPLVFPSDEFDASISQVNEKINQSLAFIRRSDELLHNVNTGKSTTNIMITTIIIVIIVVLLSLIAIGLLLYCKAKNTPVTLSKDQLSGINNIAFSK

SEQ ID NO: 567 - protein, 117 aa, Human adenovirus
MKVCLIMKVEGALWELFHMCGVDLHQQFVEIIQGWKNENYLGMVQECNMMIDEIDGGPAFNVILMLDVRVEPLLEATVEHLENRVGFDLAVCFHQHSGGERCHLRDLHFIVLRDRLE

SEQ ID NO: 568 - protein, 162 aa, Epstein-Barr virus
MSAPRKVRLPSVKAVDMSMEDMAARLARLESENKALKQQVLRGGACASSTSVPSAPVPPPEPLTARQREVMITQATGRLASQAMKKIEDKVRKSVDGVTTRNEMENILQNLTLRIQVSMLGAKGQPSPGEGTRLRESNDPNATRRARSRSRGREAKKVQISD

SEQ ID NO: 569 - protein, 300 aa, Vaccinia virus
MNFQGLVLTDNCKNQWVVGPLIGKGGFGSIYTTNDNNYVVKIEPKANGSLFTEQAFYTRVLKPSVIEEWKKSHNIKHVGLITCKAFGLYKSINVEYRFLVINRLGADLDAVIRANNNRLPKRSVMLIGIEILNTIQFMHEQGYSHGDIKASNIVLDQIDKNKLYLVDYGLVSKFMSNGEHVPFIRNPNKMDNGTLEFTPIDSHKGYVVSRRGDLETLGYCMIRWLGGILPWTKISETKNCALVSATKQKYVNNTATLLMTSLQYAPRELLQYITMVNSLTYFEEPNYDEFRHILMQGVYY

SEQ ID NO: 570 - protein, 295 aa, Human herpesvirus
MRRLTDSFILGLAKGAVIPGLYTFRMTEGRSPLGQIGVLITVAISFLLTFKRFDPRFYKPIGDFKIVFLSLMAPKLPSLLSAVVMICLIFSEMRLRMILSRCVMIMPSYSPAVFTGIMVSLFFKSQMFDDYSVLITAASLLPITVRYGWMIRSSGFLLGLQKYRPILKSTSFREVDLKCLVKFTVEFLLLFTMLWIGKMFLSMPKSNHLFFLTVVNNVFFKLNVFKAAACAVVAILSGLMMNVCLYRIIFEAFVGLGFSSIMLTLSSDLKDRSFYAGDLLNGFFCLVVCCMYFGV

SEQ ID NO: 571 - protein, 472 aa, Cercopithecine herpesvirus
MGRPASRGPAATEGDEPVSRAAWWTWCVQVGAFVVSALCLVGLLIVAHFFREGFPCFYASAASYGPANDTAEVRGGVAAPPRLDAQSLVGTYAVTATLMLAVAAYVVVGATTARYRRRQDAAELDAAARMVATHATLLGGNACVWLLQITVLLLAHSVSALAHTVYVLHFACLTYFAAHFCTRGVLSGTYLRQVHGLMDVAPTHHRIVGPVRAVMTNAMLFGALLCTAPAAVSVATIAALNFPLSAPGVLVCLAAAFAALVVLLLAVVEGLLSHYVRVLLGPHVGAIAAAGIVGVTAERYYTNGYYVAETQWPGAQTGVRVTLALVAFFALVMAGVRCVRAYLYHREHRTRFFRHMRDTKHRARSAIRRVRGSMRAARGGDPGPARPGAALEPIYSEVKYAGESDVGRDDDSEYTEGEHIYDEVASDPEDVTYARIQHRPRPVEDPEDVTYARIQHRPRPVEEPIYDTVREW

SEQ ID NO: 572 - protein, 277 aa, Vaccinia virus
MSRVRISLIYLYTLVVITTTKTIEYTACNDTIIIPCTIDNPTKYIRWKLDNHDILTYNKTSKTTILSKWHTSARLHSLSDSDVSLIIEYKDILPGTYTCEDNTGIKSTVKLVQLHTNWFNDYQTMLMFIFTGITLFLLFLEITYTSISVVFSTNLGILQVFGCVIAMIELCGAFLFYPSMFTLRHIIGLLMMTLPSIFLIITKVFSFWLLCKLSCAVHLIIYYQLAGYILTVLGLGLSLKECVDGTLLLSGLGTIMVSEHFSLLFLVCFPSTQRDYY

SEQ ID NO: 573 - protein, 257 aa, Human cytomegalovirus
MGCDVHDPSWQCQWGVPTIIVAWITCAALGIWCLAGSSADVSSGPGIAAVVGCSVFMIFLCAYLIRYREFFKDSVIDLLTCRWVRYCSCSCKCSCKCISGPCSRCCSACYKETMIYDMVQYGHRRRPGHGDDPDRVICEIVESPPVSAPTVFVPPPSEESHQPVIPPQPPTPTSEPKPKKGRAKDKPKGRPKNKPPCEPTVSSQPPSQPTAMPGGPPDASPPAMPQMPPGVAEAVQAAVQAAMAAALQQQQQHQTGT

SEQ ID NO: 574 - protein, 551 aa, Human parainfluenza 2 virus
MHHLHPMIVCIFVMYTGIVGSDAIAGDQLLNIGVIQSKIRSLMYYTDGGASFIVVKLLPNLPPSNGTCNITSLDAYNVTLFKLLTPLIENLSKISTVTDTKTRQKRFAGVVVGLAALGVATAAQITAAVAIVKANANAAAINNLASSIQSTNKAVSDVIDASRTIATAVQAIQDRINGAIVNGITSASCRAHDALIGSILNLYLTELTTIFHNQITNPALTPLSIQALRILLGSTLPIVIESKLNTNFNTAELLSSGLLTGQIISISPMYMQMLIQINVPTFIMQPGAKVIDLIAISANHKLQEVVVQVPNRILEYANELQNYPANDCVVTPNSVFCRYNEGSPIPESQYQCLRGNLNSCTFTPIIGNFLKRFAFANGVLYANCKSLLCRCADPPHVVSQDDTQGISIIDIKRCSEMMLDTFSFRITSTFNATYVTDFSMINANIVHLSPLDLSNQINSINKSLKSAEDWIADSNFFANQARTAKTLYSLSAIALILSVITLVVVGLLIAYIIKLVSQIHQFRSLAATTMFHRENPAFFSKNNHGNIYGIS

SEQ ID NO: 575 - protein, 225 aa, Epstein-Barr virus
MSDQGRLSLPRGEGGTDEPNPRHLCSYSKLEFHLPLPESMASVFACWGCGEYHVCDGSSECTLIETHEGVVCALTGNDMGPHFQPALRPWTEIRQDTQDQRDKWEPEQVQGLVQTVVNHLYHYFLNENVISGVSEALFDQDGALRPHIPALVSFVFPCCLMLFRGASSEKVVDVVLSLYIHVIISIYSQKTVYGALLFKSTRNKRYDAVAKRMRELWMSTLTTKC

SEQ ID NO: 576 - protein, 217 aa, Epstein-Barr virus
MAMFLKSRGVRSCRDRRLLSDEEEETSQSSSYTLGSQASQSIQEEDVSDTDESDYSDEDEEIDLEEEYPSDEDPSEGSDSDPSWHPSDSDESDYSESDEDEATPGSQASRSSRVSPSTQQSSGLTPTPSFSRPRTRAPPRPPAPAPVRGRASAPPRPPAPVQQSTKDKGPHRPTRPVLRGPAPRRPPPPSSPNTYNKHMMETTPPIKGNNNYNWPWL

SEQ ID NO: 577 - protein, 354 aa, Vaccinia virus
MGFCIPLRSKMLKRGSRKSSSILARRPTPKKMNIVTDLENRLKKNSYIENTNQGNILMDSIFVSTMPVETLFGSYITDDSDDYELKDLLNVTYNIKPVIVPDIKLDAVLDRDGNFRPADCFLVKLKHRDGFTKGALYLGHSAGFTATICLKNEGVSGLYIPGTSVIRSNICQGDTIVSRSSRGVQFLPQIGGEAIFLIVSLCPTKKLVETGFVIPEISSNDNAKIAARILSEKRKDTIAHIDTLIQHRQQLELAYYNSCMLTEFLHYCNSYAGTIKESLLKETIQKDINITHTNITTLLNETAKVIKLVKSLVDKEDTDIVNNFITKEIKNCGGVKNRDKIVNSLSLSNLDFRL

SEQ ID NO: 578 - protein, 293 aa, Human herpesvirus
MWNVIISFSMGLVLGNVIPGESCFHLMIKKTLFEQVVLIFLFSGGLLLTYRRVNLFNYCPFNDLKIITLSLLVLQITDEFFLVICSFLFFSEIRLRAIVCRCMLIFPTHSMASYFGTLIAIVLKISDLVHYRLLVTVFLITPYVTSYKFLVNSHQFAMCLQRYKPIYKPNGPYQMAIKDVIVYLLQFLTLTLLVWFGKLYLPRKSCQHLFFLAVLHSNLFITKLYQLVLCSILCLLAGVITEHCFFSLLFEFFLGLGYSALFAQISKTVGRKDIFTGDLLNLFYCSACFVIFF

SEQ ID NO: 579 - protein, 892 aa, Cercopithecine herpesvirus
MRPRAGPLPLPSPLVPLLALALLAATRPLGPAAATPVVSPRASPAPPVPAATPTFPDDDNDGEAGAAPGAPGTNASVEAGHATLRENLRDIKALDGDATFYVCPPPTGATVVQFEQPRPCPRAPDGQNYTEGIAVIFKENIAPYKFKATMYYKDVTVSQVWFGHRYSQFMGIFEDRAPVPFEEVIDKINARGVCRSTAKYVRNNMESTAFHRDDDESDMKLKPAKAATRTSRGWHTTDLKYNPSRIEAFHRYGTTVNCIVEEVEARSVYPYDEFVLATGDFVYMSPFYGYRDGAHAEHTAYAADRFRQVDGYYERDLSTGRRASTPATRNLLTTPKFTVGWDWAPKRPSVCTLTKWQEVDEMLRAEYGPSFRFSSSALSTTFTTNRTEYALSRVDLGDCVGREAREAVDRIFLRRYNGTHVKVGQVQYYLATGGFLIAYQPLLSNALVELYVRELLREQERRPGDAAATPKPSADPPDVERIKTTSSVEFARLQFTYDHIQRHVNDMLGRIAIAWCELQNHELTLWNEARKLNPNAIASATVGRRVSARMLGDVMAVSTCVPVTPDNVIMQNSMRVPARPGTCYSRPLVSFRYEEGGPLVEGQLGEDNEIRLERDALEPCTVGHRRYFTFGAGYVYFEDYAYSHQLGRADVTTVSTFINLNLTMLEDHEFVPLEVYTRQEIKDSGLLDYTEVQRRNQLHALRFADIDTVIKADAHAALFAGLYSFFEGLGDVGRAVGKVVMGIVGGVVSAVSGVSSFLSNPFGALAVGLLVLAGLAAAFFAFRYVMRLQRNPMKALYPLTTKELKSDGPSPAGDGGDGASGGGEEDFDEAKLAQAREMIRYMALVSAMERTEHKARKKGTSALLSAKVTNMVMRKRAKPRYSPLGDTDEEEL

SEQ ID NO: 580 - protein, 195 aa, Variola virus
MMIKWIISILTMSIMPVLVYSSSIFRFRSEDVELCYGNLYFDRIYNNVVNIKYIPEHIPYKYNFINRTFSVDELDNNVFFTHGYFLKHKYGSLNPSLIVSLSGNLKYNDIQCSVNVSCLIKNLATSISTILTSKHKTYSLHRSKCITIIGYDSIIWYKDINDKYNDIYDFTAICMLIASTLIVTIYVFKKIKMNS

SEQ ID NO: 581 - protein, 169 aa, Human cytomegalovirus
MDDLPLNVGLPIIGVMLVLIVAILCYLAYHWHDTFKLVRMFLSYRWLIRCCELYGEYERRFADLSSLGLGAVRRESDRRYRFSERPDEILVRWEEVSSQCSYASSRITDRRAGSSSSSSVHVANQRNSVPPPDMAVTAPLTDVDLLKPVTGSATQFTTVAMVHYHQEYT

SEQ ID NO: 582 - protein, 498 aa, Human immunodeficiency virus
MGASASVLTGSKLDAWEQIRLKPGSKKKYRLKHLVWASRELERFACNPELLETAEGNEKLLQQLEPALKTGSDSLQSLWNAIVVLWCVHNRYKIGDTQQAIQKLKEVMGSRKSADAAKEDTSARQAGQNYPIVSNAQGQMVHQAISPRTLNAWVKAVEEKAFNPEIIPMFMALSEGAISYDINTMLNAIGGHQGALQVLKEVINEEAVEWDRTHPPPVGPLPPGQIREPTGSDIAGTTSTQQEQIHWTTRPNQPIPVGDIYRKWIVLGLNKMVKMYSPVSILDIKQGPKEPFRDYVDRFYKTLRAEQATQEVKNWMTETLLVQNANPDCKQILKSLGPGATLEEMMVACQGVGGPTHKARVLAEAMATAQQDLKGGYTAVFMQRGQNPIRKGTIKCFNCGKEGHIARNCRAPRKKGCWKCGQEGHQMKDCRNGKQANFLGKYWPPGGTRPGNYVQRPAHPSAPPMEEEVKGQENQEQKGGPNELYPFASLKSLFGTDQ

SEQ ID NO: 583 - protein, 227 aa, Human adenovirus
MSKEIPTPYMWSYQPQMGLAAGASQDYSTRMNWLSAGPSMISQVNGIRNHRNQILLEQAAVTSTPRAKLNPRNWPSTLVYQEIPGPTTVLLPRDALAEVRMTNSGVQLAGGASRCPLRPQSGIKTLVIRGKGTQLNDELVSSAIGLRPDGVFQLAGAGKSSFTPNQAYLTLQSSSSEPRSGGIGTLQFVQEFVPSVYFNPFSGSPGLYPDEFIPNFDAVREAVDGYD

SEQ ID NO: 584 - protein, 357 aa, Epstein-Barr virus
MFSCKQHLSLGACVFCLGLLASTPFIWCFVFANLLSLEIFSPWQTHVYRLGFPTACLMAVLWTLVPAKHAVRAVTPAIMLNIASALIFFSLRVYSTSTWVSAPCLFLANLPLLCLWPRLAIEIVYICPAIHQRFFELGLLLACTIFALSVVSRALEVSAVFMSPFFIFLALGSGSLAGARRNQIYTSGLERRRSIFCARGDHSVASLKETLHKCPWDLMAISALTVLVVCVMIVLHVHAEVFFGLSRYLPLFLCGAMASGGLYLGHSSIIACVMATLCTLTSVVVYFLHETLGPLGKTVLFISIFVYYFSGVAALSSAMRYKLKKFVNGPLVHLRVVYMCCFVFTFCEYLLVTFIKS

SEQ ID NO: 585 - protein, 331 aa, Vaccinia virus
MLIIVLWLYGYNFIMSGSQCPMINDDSFTLKRKYQIDSAESTIKMDKKRIKFQNRAKMVKEINQTIRAAQTHYETLKLGYIKFKRMIRTTTLEDIAPSIPNNQKTYKLFSDISAIGKASQNPSKMVYALLLYMFPNLFGDDHRFIRYRMHPMSKIKHKIFSPFKLNLIRILVEERFYNNECRSNKWRIIGTQVDKMLIAKSDNYTIDARYNLKPMYRIKGKSEEDTLFIKQMVEQCVTSQELVEKVLKILFRDLFKSGEYKAYRYDDDVENGFIGLDTLKLNIVHDIVEPCMPVRRPVAKILCKEMVNKYFENPLHIIGKNLQECIDFVSE

SEQ ID NO: 586 - protein, 86 aa, Vaccinia virus
MLFRILSLNLIKIKKRRRRHLPNLLRRYQQLHVHNNRMEIFLVLLQRLHLLNLLLWPLYVLLHLLVVQYVQQHNKIQIQEQHLNKI

SEQ ID NO: 587 - protein, 282 aa, Molluscum contagiosum virus
MPQKARWQDTVRMRSPEKKPSPSPRSPAPRSKGTSARPEQDVHVVCSIDVGTRNPARTLLEIRGEHLRVLSVDKLDWSTDWEHRVARDVCSVRADVVLVEKQGPRSPHAKFLHFMRGLLFGQTPVLCRNPALRGGSYRARKRRSVQLFLRRLSFFGIDTRELRAHSKLDDVADSFHMALEYALARAAQAERARESATARARQAGANVAAGFRACPEPLARADTPPHRRRRARVTQASELLVAVRHDRSCVRQAENKERAWHTPKLDAPRRTETFERAGGREH

SEQ ID NO: 588 - protein, 334 aa, Vaccinia virus
MDGVIVYCLNALVKHGEEINHIKNDFMIKPCCERVCEKVKNVHIGGQSKNNTVIADLPYMDNAVSDVCNSLYKKNVSRISRFANLIKIDDDDKTPTGVYNYFKPKDVIPVIISIGKDKDVCELLISSDISCACVELNSYKVAILPMDVSFFTKGNASLIILLFDFSIDAAPLLRSVTDNNVIISRHQRLHDELPSSNWFKFYISIKSDYCSILYMVVDGSVMHAIADNRTHAIISKNILDNTTINDECRCCYFEPQIRILDRDEMLNGSSCDMNRHCIMMNLPDVGEFGSSMLGKYEPDMIKIALSVAGNLIRNRDYIPGRRGYSYYVYGIASR

SEQ ID NO: 589 - protein, 338 aa, Human cytomegalovirus
MLGIRAMLVMLDYYWIQLITNNGTRSNNTDTIFVSLLTGPNGVTRTAIGGLYSNYTNLTGAFGFTSTNMSATNSSAEDNWSVTNLTESCINRGESYVTTIWLLDCTKNDTYWYYGNAYNHTCEGTISGYLLGMCKLWKSWVNNITSYNTVRVESLGNETRCMLLPRQYTLNATVEWYNKSEGDVPEEFMDYVILTPLAVLTCGLQEAYILDKGRRYMYLFSVSCVGITGTVSIILVSLSLLILICYYRCGRLLICPRGFELLPEFTEEEEEKEKLLTHNDIEVQVPIRTRRLLVPWIRESKMWVLPPPLPPRPPHLIEFPPSPPPSPGPMHMVVCMPA

SEQ ID NO: 590 - protein, 904 aa, Human herpesvirus
MRQGAPARGRRWFVVWALLGLTLGVLVASAAPSSPGTPGVAAATQAANGGPATPAPPAPGAPPTGDPKPKKNRKPKPPKPPRPAGDNATVAAGHATLREHLRDIKAENTDANFYVCPPPTGATVVQFEQPRRCPTRPEGQNYTEGIAVVFKENIAPYKFKATMYYKDVTVSQVWFGHRYSQFMGIFEDRAPVPFEEVIDKINAKGVCRSTAKYVRNNLETTAFHRDDHETDMELKPANAATRTSRGWHTTDLKYNPSRVEAFHRYGTTVNCIVEEVDARSVYPYDEFVLATGDFVYMSPFYGYREGSHTEHTSYAADRFKQVDGFYARDLTTKARATAPTTRNLLTTPKFTVAWDWVPKRPSVCTMTKWQEVDEMLRSEYGGSFRFSSDAISTTFTTNLTEYPLSRVDLGDCIGKDARDAMDRIFARRYNATHIKVGQPQYYLANGGFLIAYQPLLSNTLAELYVREHLREQSRKPPNPTPPPPGASANASVERIKTTSSIEFARLQFTYNHIQRHVNDMLGRVAIAWCELQNHELTLWNEARKLNPNAIASATVGRRVSARMLGDVMAVSTCVPVAADNVIVQNSMRISSRPGACYSRPLVSFRYEDQGPLVEGQLGENNELRLTRDAIEPCTVGHRRYFTFGGGYVYFEEYAYSHQLSRADITTVSTFIDLNITMLEDHEFVPLEVYTRHEIKDSGLLDYTEVQRRNQLHDLRFADIDTVIHADANAAMFAGLGAFFEGMGDLGRAVGKVVMGIVGGVVSAVSGVSSFMSNPFGALAVGLLVLAGLAAAFFAFRYVMRLQSNPMKALYPLTTKELKNPTNPDASGEGEEGGDFDEAKLAEAREMIRYMALVSAMERTEHKAKKKGTSALLSAKVTDMVMRKRRNTNYTQVPNKDGDADEDDL

SEQ ID NO: 591 - protein, 327 aa, Human adenovirus
MSKRKIKEEMLQVVAPEIYGPPQADQKPRKIKRVKKKDEVDKEAVEFVREFAPRRRVNWKGRRVQRVLRPGTAVVFTPGERSSVRSKRSYDEVYGDDDILDQAAERAGEFAYGKRSREEELISLPLDESNPTPSLKPVTLQQMLPQAVLLPSRGVKREGENMYPTMQIMVPKRRRVEDVLDTVKMDVEPQVKVRPIKQVAPGLGVQTVDIQIPTDMDVDKKPSTSIEVQTDPWLLASTAATATEPPRRRRWGPANRLMPNYVLHPSIIPTPGYRGTRYYASRRRPAGKRRRRTTTRRRLAPARVRRVTTRRGRSLVLPTVRYHPSIL

SEQ ID NO: 592 - protein, 357 aa, Epstein-Barr virus
MFSCKQHLSLGACVFCLGLLASTPFIWCFVFANLLSLEIFSPWQTHVYRLGFPTACLMAVLWTLVPAKHAVRAVTPAIMLNIASALIFFSLRVYSTSTWVSAPCLFLANLPLLCLWPRLAIEIVYICPAIHQRFFELGLLLACTIFALSVVSRALEVSAVFMSPFFIFLALGSGSLAGARRNQIYTSGLERRRSIFCARGDHSVASLKETLHKCPWDLLAISALTVLVVCVMIVLHVHAEVFFGLSRYLPLFLCGAMASGGLYLGHSSIIACVMATLCTLSSVVVYFLHETLGPLGKTVLFISIFVYYFSGVAALSAAMRYKLKKFVNGPLVHLRVVYMCCFVFTFCEYLLVTFIKS

SEQ ID NO: 593 - protein, 308 aa, Vaccinia virus
MKTISVVTLLCVLPAVVYSTCTVPTMNNAKLTSTETSFNNNQKVTFTCDQGYHSSDPNAVCETDKWKYENPCKKMCTVSDYISELYNKPLYEVNSTMTLSCNGETKYFRCEEKNGNTSWNDTVTCPNAECQPLQLEHGSCQPVKEKYSFGEYITINCDVGYEVIGASYISCTANSWNVIPSCQQKCDIPSLSNGLISGSTFSIGGVIHLSCKSGFTLTGSPSSTCIDGKWNPILPTCVRSNEKFDPVDDGPDDETDLSKLSKDVVQYEQEIESLEATYHIIIVALTIMGVIFLISVIVLVCSCDKNND

SEQ ID NO: 594 - protein, 70 aa, Vaccinia virus
MGKVRIFLPLTSLSIEITHPPTELIQSIIVDSLWGIRWYISLSFTTSTLKMLVRSTVSSICLLISSDIIF

SEQ ID NO: 595 - protein, 338 aa, Cercopithecine herpesvirus
MDPPAPTDAAVPGGSLERREPAGAAAAVTPDPERYFYTTQCPDINHLRSLSILNRWLESELVFAGDEEDVHGLTDDELNFYRFLFTFLSAADDLVTENLGGLSGLFPQKDILHYYVEQEAIEVVHSRVYSIIQLVLFHNNEQARREYVSRTIHHPAIRVKVEWLEARVQACESVPEKFILMILIEGIFFAASFAAIGFLRTNNLLRVTCQSNDLISRDEAVHTTASCYIYNNYLGGHRKPTAERVYRLFREAVDIEIGFIRSQAPANSRVLDAAALDAIENYVRFSADRLLVLIKMKPLFGAPAPAPSFPLSLMSTEKHTNFFECRSTAYAGAVVNDL

SEQ ID NO: 596 - protein, 190 aa, Vaccinia virus
MDIKIDISISGDKFTVTTRRENEERKKYLPLQKEKTTDVIKPDYLEYDDLLDRDEMSTILEEYFMYRGLLGLRIKYGRLFNEIKKFDNDAEEQFGTIEELKQKLRLNSEEGADNFIDYIKVQKQDIVKLTVYDCISMIGLCACVVDVWRNEKLFSRWKYCLRAIKLFINDHMLDKIKSILQNRLVYVEMS

SEQ ID NO: 597 - protein, 176 aa, Human cytomegalovirus
MKPLVMLICFGVILLQLGVTKVCQHNEVQLGNECCPPCGLGQRVTKVCTERTSVTCTPCPNGTYVSGLYNCTDCTQCNVTQVMIRNCTSTNNTVCAPKNHTYFSTPGVQHHKQRQQNHTAHITVKQGKSGRHTLAWLSLFIFLVGIILLILYLIAAYRSERCQQCCSIGKIFYRTL

SEQ ID NO: 598 - protein, 591 aa, Vaccinia virus
MIVLPNKVRIFINDRMKKDIYLGISNFGFENDIDEILGIAHLLEHLLISFDSTNFLANASTSRSYMSFWCKSINSATESDAIRTLVSWFFSNGKLKDNFSLSSIRFHIKELENEYYFRNEVFHCMDILTFLSGGDLYNGGRIDMIDNLNIVRDMLVNRMQRISGSNIVIFVKRLGPGTLDFFKQTFGSLPACPEIIPSSIPVSTNGKIVMTPSPFYTVMVKINPTLDNILGILYLYETYHLIDYETIGNQLYLTVSFIDETEYESFLRGEAILQISQCQSINMNYSDDYMMNIYLNFPWLSHDLYDYITRINDDSKSILISLTNEIYASIINRDIIVIYPNFSKAMCNTRDTQQHPIVVLDATNDGLIKKPYRSIPLMKRLTSNEIFIRYGDASLMDMITLSLSKQDISLKRNAEGIRVKHSFSADDIQAIMESDSFLKYSRSKPAAMYQYIFLSFFASGNSIDDILANRDSTLEFSKRTKSKILFGRNTRYDVTAKSSFVCGIVRGKSLDKTSLVEMMWDLKKKGLIYSMEFTNLLSKNTFYLFTFTIYTDEVYDYLNTNKLFSAKCLVVSTKGDVENFSSLKKDVVIRV

SEQ ID NO: 599 - protein, 448 aa, Human adenovirus
METRGRRSGAVLDQPDEPEAHPRKRPARRAPLYRDGDHPDADAATLEGPDPGRAGRPSSGALLPQSPQPAKRGGLLDRDAVEHITELWDRLELLQQTLSKMPMADGLKPLKNFASLQELLSLGGERLLAELVRENMHVRQMMNEVAPLLREDGSCVSLNYHLQPVIGVIYGPTGCGKSQLLRNLLSAQLISPAPETVFFIAPQVDMIPPSELKAWEMQICEGNYAPGIEGTFVPQSGTLRPKFIKMAYEDLTQDHNYDVSDPRNVFAQAAAHGPIAIIMDECMENLGGHKGVSKFFHAFPSKLHDKFPKCTGYTVLVVLHNMNPRRDLGGNIANLKIQAKMHLISPRMHPSQLNRFVNTYTKGLPVAISLLLKDIVQHHALRPCYDWVIYNTTPEHEALQWSYLHPRDGLMPMYLNIQSHLYRVLEKIHRVLNDRGRWSRAYRARKIK

SEQ ID NO: 600 - protein, 60 aa, Epstein-Barr virus; identical to SEQ ID NO: 416

SEQ ID NO: 601 - protein, 185 aa, Vaccinia virus
MMTPENDEEQTSVFSATVYGDKIQGKNKRKRVIGLCIRISMVISLLSMITMSAFLIVRLNQCMSANEAAITDTAVAVAAASSTHRKVASSTTQYDHKESCNGLYYQGSCYILHSDYQLFSDAKANCTAESSTLPNKSDVLITWLIDYVEDTWGSDGNPITKTTSDYQDSDVSQEVRKYFCVKTMN

SEQ ID NO: 602 - protein, 71 aa, Vaccinia virus
MSVLINGTCFPGLFILSHLDGDEGLLSHAGDEGLSTLSTQEALLPSHSTVLTSHTLTAFRTRYLPSLVLII

SEQ ID NO: 603 - protein, 98 aa, Cercopithecine herpesvirus
MGLAGSRAATCCCRRNVLVTEQGETVSLTATEFDAVELDSDAGGNFYISPELRVVTQPRPQPPRRGGPPSRSGRHWSCSGQRPNPSNRPPSPLMSDDE

SEQ ID NO: 604 - protein, 214 aa, Vaccinia virus
MAFDISVNASKTINALVYFSTQQNKLVIRNEVNDTHYTVEFDRDKVVDTFISYNRHNDTIEIRGVLPEETNIGCAVNTPVSMTYLYNKYSFKLILAEYIRHRNTISGNIYSALMTLDDLAIKQYGDIDLLFNEKLKVDSDSGLFDFVNFVKDMICCDSRIVVALSSLVSKHWELTNKKYRCMALANIYLIVFQYLSYLDYDTIYVSIYAGTLRA

SEQ ID NO: 605 - protein, 180 aa, Human cytomegalovirus
MWGCGWSRIIVLLPLMCMALMARGTYGTYICSPNPGRLRISCALSVLDQRLWWEIQYSSGRLTRVLVFHDDGEEGGDLHLTDTRHCTSCTHPYVISLVTPLTINATLRLLIQDGMYGRGEKELCIAHLPTLRDIRTCRVDADLGLLYAVCLILSFSIVAAALWKVDYDRSVAVGPKSYKS

SEQ ID NO: 606 - protein, 591 aa, Variola virus
MIVLPNKVRIFINDRMKKDIYLGISNFGFENDIDEILGIAHLLEHLLISFDSTIFLANASTSRSYMSFWCKSINSATESDAIRTLVSWFFSNGKLKDNFSLSSIRFHIKELENEYYFRNEVFHCMDILTFLSGGDLYNGGRIDMIDNLNIVRDMLVNRMQRISGSNIVIFVKRLGPGTLDFFNQTFGSLPACPEIIPSSIPVSTNGKIVMTPSPFYTVMVKINPTLDNILGILYLYETYHLIDYETIGNQLYLTVSFIDETEYESFLRGEAILQISQCQRINMNYSDDYMMNIYLNFPWLSHDLYDYITRINDDSKSILISLTNEIYTSIINRDIIVIYPNFSKAMCNTRDTQQHPIVVLDATNDGLIKKPYRSIPLMKRLTSNEIFIRYGDASLMDMITLSLSKQDISLKRNAEGIRVKHSFSADDIQAIMESDSFLKYSRSKPAAMYQYIFLSFFASGNSIDDILTNRDSTLEFSKKTKSKILFGRNARYDVTTKSSFVCGIVRGKLLDKTSLVEMMWDLKKKGLIYSMEFTNLLSKNTFYLFTFTIYTDEVYDYLNTNKLFSAKCLVISTKGDVENFSSLKKDVVIRV

SEQ ID NO: 607 - protein, 194 aa, Human adenovirus
MAPKKKLQLPPPPPTDEEEYWDSQAEEVLDEEEEMMEDWDSLDEEASEAEEVSDETPSPSVAFPSPAPQKSATVPSIATTSAPQAPPALPVRRPNRRWDTTGTRAGKSKQPPPLAQEQQQRQGYRSWRVHKNAIVACLQDCGGNISFARRFLLYHHGVAFPRNILHYYRHLYSPYCTGGSGSNSSGHAEAKATG

SEQ ID NO: 608 - protein, 537 aa, Epstein-Barr virus
MSGQQRGSVILVPEHLAGALTKLMSDFITGQDVTLSGGNIAVKIRDAINQTPGGGDVAILSSLFALWNALPTSGRQSSRDDLIPAAVQALTTAHNLCLGVIPGETSHKDTPESLLRAIVTGLQKLWVDSCGCPECLQCLKGLKAIKPGLYEIPRIIPHTKQCSPVNLLNMLVHKLVALRGHVQLAYDARVLTPDFHEIPDLDDSDAVFARTLLAALFHLNMFFILKDYITQDSMSLKQALSGHWMSATGNPLPAAPETLRDYLEAFRNSDNHFYLPTTGPLNTFQFPEELLGRVVVIDSSLCAASHVQDVITHGVGAGVPRPRFSALPPAPSREPQQTCSQLTSRGNESSRRNLGQPGGTSPAVPPVCPIVSLTASGAKQNRGGMGSLHLAKPEETSPAVSPVCPIASPAASRSKQHCGVTGSSQAAPSFSSVAPVASLSGDLEEEEEGSRESPSLPSSKKGDEEFEAWLEAQDANLEDVQREFSGLRVIGDEDEDGSEDGEFSDLDLSDSDHEGDEGGGAVGGGRSLHSLYSLSVV

SEQ ID NO: 609 - protein, 192 aa, Vaccinia virus
MADKKNLAVRSSYDDYIETVNKITPQLKNLLAQIGGDAAVKGGNNNLNSQTDVTAGACDTKSKSTKCITCKPKSKSSSSSTSTSKGSKNTSGAPRRRTTVTTTSYNAMDGQIVQAVTNAGKIVYGTVRDGQLEVRGMVGEINHDLLGIDSVNAGKKKPSKKMPTNKKINMSSGMRRQEQINPDDCCLDMGMY

SEQ ID NO: 610 - protein, 69 aa, Vaccinia virus
MIERILFPTMSGTSRSPPSYLFIRKNVILDIVQIIKSPYMFAIVEIVFHSCSKTMAVTYELRYTLESHL

SEQ ID NO: 611 - protein, 162 aa, Human herpesvirus
MSAEMLRAVQLQPRRRGHSSSPTSPPLEGEPSPKRLQSSDSHQGRRGRPKPRAKTWSEALSHRSFLNIYAWLSLSRGSPRKVYGYAFRHRGELVALPWPPNWSLELHHDPYRDARAQTVWSHRWGWPATHVTARTVRDCGECKQCDTLLSQLSYPINFLLMY

SEQ ID NO: 612 - protein, 168 aa, Vaccinia virus
MNKPKTDYAGYACCVICGLIVGIIFTATLLKVVERKLVHTPSIDKTIKDAYIREDCPTDWISYNNKCIHLSTDRKTWEEGRNTCKALNPNSDLIKIETPNELSFLRSLRRGYWVGESEILNQTTPYNFIAKNATKNGNIFVAQRILPNCIRVTLYNNYTTFLSYHYFG

SEQ ID NO: 613 - protein, 217 aa, Human adenovirus
MKIVGADGQEQEETDIPFRLWRKFAARRKLQYQSWEEGKEVLLNKLDRNLLTDFKAFAARFSSRPRPSKIFGTSLSEAISGEGNGQSGRGAARNHPRARTRCGATSPNHGGRVVPVPVAAASPGAPKKADEAAYRVRGRGRLITRRAGAAHTQPAAIDLGGGFGHCAQEEKEAPFSQARAPAITRGNRGQRGRKRRCGATNGGFQQPTGANQAWQRR

SEQ ID NO: 614 - protein, 512 aa, Human immunodeficiency virus
MGARASVLSGGELDRWEKIRLRPGGKKKYKLKHIVWASRELERFAVNPGLLETSEGCRQILGQLQPSLQTGSEELRSLYNTVATLYCVHQRIEIKDTKEALDKIEEEQNKSKKKAQQAAADTGHSSQVSQNYPIVQNIQGQMVHQAISPRTLNAWVKVVEEKAFSPEVIPMFSALSEGATPQDLNTMLNTVGGHQAAMQMLKETINEEAAEWDRVHPVHAGPIAPGQMREPRGSDIAGTTSTLQEQIGWMTNNPPIPVGEIYKRWIILGLNKIVRMYSPTSILDIRQGPKEPFRDYVDRFYKTLRAEQASQEVKNWMTETLLVQNANPDCKTILKALGPAATLEEMMTACQGVGGPGHKARVLAEAMSQVTNTATIMMQRGNFRNQRKMVKCFNCGKEGHTARNCRAPRKKGCWKCGKEGHQMKDCTERQANFLGKIWPSYKGRPGNFLQSRPEPTAPPFLQSRPEPTAPPEESFRSGVETTTPPQKQEPIDKELYPLTSLRSLFGNDPSSQ

SEQ ID NO: 615 - protein, 257 aa, Human adenovirus
MDSDAPGPVMCFCRQMEDINFSSLAPRHGTRPFMGTWSDIGTSQLNGGAFNWSSLWSGLKNFGSTLKTYGSKAWNSTTGQALRDKLKEQNFQQKVVDGLASGINGVVDLANQAVQRQINSRLDPVPPAGSVEMPQVEEELPPLDKRGDKRPRPDAEETLLTHTDEPPPYEEAVKLGLPTTRPIAPLATGVLKPESSKPATLDLPPPPTPRPSTVAKPLPPVAVARARPGARPQANWQSTLNSIVGLGVQSVKRRRCY

SEQ ID NO: 616 - protein, 245 aa, Epstein-Barr virus
MMDPNSTSEDVKFTPDPYQVPFVQAFDQATRVYQDLGGPSQAPLPCVLWPVLPEPLPQGQLTAYHVSTAPTGSWFSAPQPAPENAYQAYAAPQLFPVSDITQNQQTNQAGGEAPQPGDNSTVQTAAAVVFACPGANQGQQLADIGVPQPAPVAAPARRTRKPQQPESLEECDSELEIKRYKNRVASRKCRAKFKQLLQHYREVAAAKSSENDRLRLLLKQMCPSLDVDSIIPRTPDVLHEDLLNF

SEQ ID NO: 617 - protein, 259 aa, Vaccinia virus
MENVYISSYSSNEQTSMAVTATDIRELLSQYVDDANLEDLIEWAMEKSSKYYIKNIGNTKSNIEETKFESKNNIGIEYSKDSRNKLSYRNKPSIATNLEYKTLCDMIKGTSGTEKEFLRYLLFGIKCIKKGVEYNIDKIKDVSYNDYFNVLDEKYNTPCPNCKSRNTTPMMIQTRAADEPPLVRHACRDCKQHFKPPKFRAFRNLNVTTQSIHENKEITEILPDNNPSPPESPEPASPIDDGLIRSTFDRNDEPPEDDE

SEQ ID NO: 618 - protein, 82 aa, Vaccinia virus
MDLARLGSMSSYDFSTVVSVLLVSIRSMSRSIESKHDRSEDNEYLYASFCTVTSRFVRCLHRALTSMVQILSSLCVSYSSLL

SEQ ID NO: 619 - protein, 588 aa, Human adenovirus
MEQQQAPDPAMRAALQSQPSGINSSDDWTQAMQRIMALTTRNPEAFRQQPQANRLSAILEAVVPSRSNPTHEKVLAIVNALVENKAIRPDEAGLVYNALLERVARYNSSNVQTNLDRMVTDVREAVSQRERFQRDANLGSLVALNAFLSTQPANVPRGQQDYTNFLSALRLMVAEVPQSEVYQSGPDYFFQTSRQGLQTVNLTQAFKNLKGLWGVHAPVGDRATVSSLLTPNSRLLLLLVSPFTDSGSIDRNSYLGYLLNLYREAIGQSQVDEQTYQEITQVSRALGQEDTGSLEATLNFLLTNRSQKIPPQYALTAEEERILRYVQQSVGLFLMQEGATPTAALDMTARNMEPSMYASNRPFINKLLDYLHRAAAMNSDYFTNAILNPHWLPPPGFYTGEYDMPDPNDGFLWDDVDSSIFSPPPGYTVWKKEGGDRRHSSVSLSTTAGAAATVPEAASPFPSLPFSLNSVRSSELGRITRPRLMGEDEYLNDSLLRPEREKNFPNNGIESLVDKMSRWKTYAQDHRDEPKILGATSRPTRRRQRHDRQMGLVWDDEDSADDSSVLDLGGRGGGNPFAHLRPRFGRML

SEQ ID NO: 620 - protein, 70 aa, Vaccinia virus
MIGILLLIGICVAVTVAILYSMYNKIKNSQNPNPSPNLNSPPPEPKNTKFVNNLEKDHISSLYNLVKSSV

SEQ ID NO: 621 - protein, 90 aa, Vaccinia virus
MTRWWRSRYICRSQCSNVKNSTCSQQILYIHLLILSYTTITKSFFKTLNHHQKSMFKVIRLKYIFEINSCISHPSILDLYVLKNTILLIL

SEQ ID NO: 622 - protein, 500 aa, Human immunodeficiency virus
MGARASVLSGGKLDKWEKIRLRPGGKKKYRLKHIVWASRELERYALNPGLLETSEGCKQIIGQLQPAIQTGTEELRSLYNTVATLYCVHKGIDVKDTKEALEKMEEEQNKSKKKAQQAAADTGNNSQVSQNYPIVQNLQGQMVHQAISPRTLNAWVKVIEEKAFSPEVIPMFSALSEGATPQDLNTMLNTVGGHQAAMQMLKETINEEAAEWDRLHPVHAGPIAPGQMREPRGSDIAGTTSTLQEQIAWMTSNPPIPVGEIYKRWIIVGLNKIVRMYSPVSILDIRQGPKEPFRDYVDRFYKTLRAEQASQDVKNWMTETLLVQNANPDCKTILKALGPQATLEEMMTACQGVGGPSHKARVLAEAMSQATNSVTTAMMQRGNFKGPRKIIKCFNCGKEGHIAKNCRAPRKKGCWRCGKEGHQLKDCTERQANFLGRIWPSHKGRPGNFLQSRPEPTAPPAESFGFGEEITPSQKQEQKDKELYPLTSLKSLFGNDPLSQ

SEQ ID NO: 623 - protein, 159 aa, Human adenovirus
MRYMILGLLALAAVCSAAKKVEFKEPACNVTFKSEANECTTLIKCTTEHEKLIIRHKDKIGKYAVYAIWQPGDTNDYNVTVFQGENRKTFMYKFPFYEMCDITMYMSKQYKLWPPQKCLENTGTFCSTALLITALALVCTLLYLKYKSRRSFIDEKKMP

SEQ ID NO: 624 - protein, 65 aa, Vaccinia virus
MMIYGLIACLIFVTSSIASPPITEDKSFNSVEVLVSLFRDDQKDYTVTSQFNNYTIDTKDWTIHT

SEQ ID NO: 625 - protein, 190 aa, Vaccinia virus
MDIKIDISIFGDKFTVTTRRENEERKKYLPLQKEKTTDVIKPDYLEYDDLLDRDEMFTILEEYFMYRGLLGLRIKYGRLFNEIKKFDNDAEEQFGTIEELKQKLRLNSEEGADNFIDYIKVQKQDIVKLTVYDCISMIGLCACVVDVWRKEKLFSRWKYCLRAIKLFINDHMLDKIKSILQNRLVYVEMS

SEQ ID NO: 626 - protein, 66 aa, Vaccinia virus
MYVHSSNLTDTISYPDVVINYRSWTKCTHFFGLLFDSRIIMLNFSIYSVSCFKYVMMNPYSFQTQV

SEQ ID NO: 627 - protein, 299 aa, Human adenovirus
MSGSNSIMTRLRARSTSCARHHPYTRAQLPRCEENETRASMTEDHPLLPDCDTMTMHSVSCVRGLPCSASFTVLQEFPIPWDMFLNPEELKIMKRCMHLCLCCATIDIFYSQVIHGRENWVLHCHCNRQGSLQCMAGGAVLAVWFRKVILGCMINQRCPWYRQIVNMHMPKEIMYVGSVFLRERHLIYIKIWYDGHAGAIISDMSFGWSAFNYGLLNNIVIMCCTYCSNLSEIRMRCCAHRTRKLMLRAIKMMLQDTVDPDPINSSRTERRRQRLLVGLMRHNRPIPFSDYDSHRSSSR

SEQ ID NO: 628 - protein, 68 aa, Variola virus
MIGILLLIGICVAVTVAILYAMYNKIKNSQNPSPNVNLPPPETRNTRFVNNLEKDHISSLYNLVKSSV

SEQ ID NO: 629 - protein, 433 aa, Human herpesvirus
MMICFVFLCVLTFVRGEIYPSTCPALGAGNGEAVRSGEMLLEISAYRNWRSGKMELWGSAAVNNQVFYGGMEDSQIEYDFGKFLVFRCFQVFHNVHKLLFNTVSSATMHLARKRVQKCGHGKMTFISIQVQCSVNKKSIRLSRMNETNLKKQVLRVAFFLDGSNNSWIADKNFQGEDRTMLRLWTELSTYRQYLISSCNNDVKVLSELYGEFRRMALSYDEELKLNFMPVIRSSSERLFRADDLKCSFSRWLGAEGEFAVCEYSGWGVSKLGKIEIFAEEPLTFDMVWKTVKMRSSGAYTSLFRDDVTWGLISLDKWVGDKYFCMCTNKESGDNVIVTLPEKNVEKSIQIYNEGSTMLAFAEITSIMVNLMFMGAVAVCVGILGISCFVGLKEIIYFIFVSVNSMWPFCNKLLTTAVNCFFKGRTFLRRELKI

SEQ ID NO: 630 - protein, 1684 aa, Crimean-Congo hemorrhagic fever virus
MHISLMYAILCLQLCGLGETHGSHNETRHNKTDTMTTPGDNPSSEPPVSTALSITLDPSTVTPTTPASGLEGSGEVYTSPPITTGSLPLSETTPELPVTTGTDTLSAGDVDPSTQTAGGTSAPTVRTSLPNSPSTPSTPQDTHHPVRNLLSVTSPGPDETSTPSGTGKESSATSSPHPVSNRPPTPPATAQGPTENDSHNATEHPESLTQSATPGLMTSPTQIVHPQSATPITVQDTHPSPTNRSKRNLKMEIILTLSQGLKKYYGKILRLLQLTLEEDTEGLLEWCKRNLGLDCDDTFFQKRIEEFFITGEGHFNEVLQFRTPGTLSTTESTPAGLPTAEPFKSYFAKGFLSIDSGYYSAKCYSGTSNSGLQLINITRHSTRIVDTPGPKITNLKTINCINLKASIFKEHREVEINVLLPQVAVNLSNCHVVIKSHVCDYSLDIDGAVRLPHIYHEGVFIPGTYKIVIDKKNKLNDRCTLFTDCVIKGREVRKGQSVLRQYKTEIRIGKASTGSRRLLSEEPSDDCISRTQLLRTETAEIHGDNYGGPGDKITICNGSTIVDQRLGSELGCYTINRVRSFKLCENSATGKNCEIDSVPVKCRQGYCLRITQEGRGHVKLSRGSEVVLDACDTSCEIMIPKGTGDILVDCSGGQQHFLKDNLIDLGCPKIPLLGKMAIYICRMSNHPKTTMAFLFWFSFGYVITCILCKAIFYLLIIVGTLGKRLKQYRELKPQTCTICETTPVNAIDAEMHDLNCSYNICPYCASRLTSDGLARHVIQCPKRKEKVEETELYLNLERIPWVVRKLLQVSESTGVALKRSSWLIVLLVLFTVSLSPVQSAPIGQGKTIEAYRAREGYTSICLFVLGSILFIVSCLMKGLVDSVGNSFFPGLSICKTCSISSINGFEIESHKCYCSLFCCPYCRHCSTDKEIHKLHLSICKKRKKGSNVMLAVCKLMCFRATMEVSNRALFIRSIINTTFVLCILILAVCVVSTSAVEMENLPAGTWEREEDLTNFCHQECQVTETECLCPYEALVLRKPLFLDSTAKGMKNLLNSTSLETSLSIEAPWGAINVQSTYKPTVSTANIALSWSSVEHRGNKILVSGRSESIMKLEERTGISWDLGVEDASESKLLTVSVMDLSQMYSPVFEYLSGDRQVGEWPKATCTGDCPERCGCTSSTCLHKEWPHSRNWRCNPTWCWGVGTGCTCCGLDVKDLFTDYMFVKWKVEYIKTEAIVCVELTSQERQCSLIEAGTRFNLGPVTITLSEPRNIQQKLPPEIITLHPRIEEGFFDLMHVQKVLSASTVCKLQSCTHGVPGDLQVYHIGNLLKGDKVNGHLIHKIEPHFNTSWMSWDGCDLDYYCNMGDWPSCTYTGVTQHNHASFVNLLNIETDYTKNFHFHSKRVTAHGDTPQLDLKARPTYGAGEITVLVEVADMELHTKKIEISGLKFASLACTGCYACSSGISCKVRIHVDEPDELTVHVKSDDPDVVAASSSLMARKLEFGTDSTFKAFSAMPKTSLCFYIVEREHCKSCSEEDTKKCVNTKLEQPQSILIEHKGTIIGKQNSTCTAKASCWLESVKSFFYGLKNMLSGIFGNVFMGIFLFLAPFILLILFFMFGWRILFCFKCCRRTRGLFKYRHLKDDEETGYRRIIEKLNNKKGKNKLLDGERLADRRIAELFSTKTHIG

SEQ ID NO: 631 - protein, 106 aa, Human adenovirus
MSHGGAADLARLRHLDHCRRFRCFARDLAEFTYFELSEEHPQGPAHGVRIVVEGGLDSHLLRIFSQRPILVQRQQGNTLLTLYCICNHPGLHESLCCLLCTEYNKS

SEQ ID NO: 632 - protein, 103 aa, Vaccinia virus
MEQTLTRLHTYLQQYTKHSPRVVYALLSRGYVIILIVHPSWNDCATGHILIMLLNWHEQKEEGQHLLYLFIKHNQGYTLNILRYLLDRFDIQKDEYIYRLSKL

SEQ ID NO: 633 - protein, 150 aa, Vaccinia virus; identical to SEQ ID NO: 368

SEQ ID NO: 634 - protein, 67 aa, Vaccinia virus
MDATAGLHLGFRRLGILTQAASPWNQRSTDVGFGRPPTTYNLLLAGIPVAYSLGLFIGGIGIQLFDI

SEQ ID NO: 635 - protein, 192 aa, Human adenovirus
MSILISPSNNTGWGLYAPTKMYGGARIRSTQHPVRVRGHFRAPWGALKGRTRTRTTVDDVIDQVVADARNYTPTAPTSTVDAVIDSVVADARAYARRKSRRRRIARRHRATTAMRAAKAILRRAKRVGRRAMLRAARRAALGASSGRSRRRAATAAAAAIANMAQPRRGNVYWVRDATTGQRVPVRTRPPRT

SEQ ID NO: 636 - protein, 53 aa, Variola virus; identical to SEQ ID NO: 476

SEQ ID NO: 637 - protein, 114 aa, Human herpesvirus
MICLFYFNVLIIYLHTFLKNEKKNITDGLFLDSVTSQAMENKESMKKNEGEPPVWIQALTTTLSIILLVCIIMACIICSRTTEEEKSEMQSSASSVETLQSLNEAIFPKGEMNV

SEQ ID NO: 638 - protein, 214 aa, Human herpesvirus
MHFLVVYILIHFHAYRGMAALPLFSTLPKITSCCDSYVVINSSTSVSSLISTCLDGEILFQNEGQKFCRPLTDNRTIVYTMQDQVQKPLSVTWMDFNLVISDYGRDVINNLTKSAMLARKNGPRYLQMENGPRYLQMETRISDLFRHECYQDNYYVLDKKLQMFYPTTHSNELLFYPSEATLPSPWQEPPFSSPWPEPTFPSRWYWLLLNYTNY

SEQ ID NO: 639 - protein, 191 aa, Human adenovirus
MRHLHLLSSTVPIDMAALLLEDYVNTILEDELHLSPFELGPTLQDLYDLEVNAQENDPNEEAVNLIFPESMILQADIASEAVPTSVYTPTLPPIPKLEEEDKLDLRCYEEGFPPSDSEDERGPVSEDESSPLEEDHPSPPDLTNDTPLQVRRPTPVRPSGERRAAVYKIEDLLQDVGGNEPLNLSLKRPRN

SEQ ID NO: 640 - protein, 66 aa, Variola virus
MDLSRINTRKSKQLKSFLSSKDTFKADVHGHSALYYAIADNNMRLVCTLLNAGALKNLLENEFPLH

SEQ ID NO: 641 - protein, 224 aa, Vaccinia virus; identical to SEQ ID NO: 453

SEQ ID NO: 642 - protein, 72 aa, Vaccinia virus
MRSLPDIFYNFIHLQLYSLFSLLLVIISHNLGNTYPLIVRYLIQVITYNYQLFLYIIDWMVDIHGGINYSNR

SEQ ID NO: 643 - protein, 278 aa, Human adenovirus
MRTEITPLVLSCEEADDILEDLVNNFFTEVPDDGDDFYTPSLYELYDIDVDVTDNDCDEQAVSAFFPESLLLATSEGLLLTEPPVISPVAASDGLLLTDPPILSPVCEPVGGEYMPRLQPEDMDLLCYETGFPLSDSEDEQDVRGMALVSASAMAAVTHHEKFELDNPELPGHDCKSCEYHRNSTGNNDLMCSLCYLRAYGMFIYSPVSDNEVDDSNRDKRPSPPTLGNAVPEGVLKPVPQRITGRRTHVESILDLIQEEESEQTEPVDLSVKRPRYD

SEQ ID NO: 644 - protein, 90 aa, Vaccinia virus [sequence omitted]

SEQ ID NO: 645 - protein, 138 aa, Human cytomegalovirus
MLWILVLFALAASASETTTGTSSNSSQSTSAGTTNTTTPSTACINASNGSDLGAPQLALLAASGWTLSGLLLIFTCCLCCFWLVRKVCSCCGNSSESESKATHAYTNAAFTSSDATLPMGTTGSYTPPQDGSFPPPPR

SEQ ID NO: 646 - protein, 655 aa, Influenza C virus
MFFSLLLMLGLTEAEKIKICLQKQVNSSFSLHNGFGGNLYATEEKRMFELVKPKAGASVLNQSTWIGFGDSRTDKSNSAFPRSADVSAKTADKFRSLSGGSLMLSMFGPPGKVDYLYQGCGKHKVFYEGVNWSPHAAINCYRKNWTDIKLNFQKNIYELASQSHCMSLVNALDKTIPLQATAGVAKNCNNSFLKNPALYTQEVNPSVEKCGKENLAFFTLPTQFGTYECKLHLVASCYFIYDSKEVYNKRGCDNYFQVIYDSSGKVVGGLDNRVSPYTGNSGDTPTMQCDMLQLKPGRYSVRSSPRFLLMPERSYCFDMKEKGPVTAVQSIWGKGRESDHAVDQACLSTPGCMLIQKQKPYIGEADDHHGDQEMRELLSGLDYEARCISQSGWVNETSPFTEEYLLPPKFGRCPLAAKEESIPKIPDGLLIPTSGTDTTVTKPKSRIFGIDDLIIGLLFVAIVEAGIGGYLLGSRKVSGGGVTKESAEKGFEKIGNDIQILRSSTNIAIEKLNDRISHDEQAIRDLTLEIENARSEALLGELGIIRALLVGNISIGLQESLWELASEITNRAGDLAVEVSPGCWVIDNNICDQSCQNFIFKFNETAPVPTIPPLDTKIDLQSDPFYWGSSLGLAITAAISLAALVISGIAICRTK

SEQ ID NO: 647 - protein, 74 aa, Human adenovirus
MALTCRLRIPVPNYRGRSRRRRGMAGSGLNRRRRRAMRRRLSGGFLPALIPIIAAAIGTIPGIASVALQASQRR

SEQ ID NO: 648 - protein, 585 aa, Human adenovirus
MMQDATDPAVRAALQSQPSGLNSTDDWRQVMDRIMSLTARNPDAFRQQPQANRLSAILEAVVPARANPTHEKVLAIVNALAENRAIRPDEAGLVYDALLQRVARYNSGNVQTNLDRLVGDVREAVAQRERAQQQGNLGSMVALNAFLSTQPANVPRGQEDYTNFVSALRLMVTETPQSEVYQSGPDYFFQTSRQGLQTVNLSQAFKNLQGLWGVRAPTGDRATVSSLLTPNSRLLLLLIAPFTDSGSVSRDTYLGHLLTLYREAIGQAHVDEHTFQEITSVSRALGQEDTGSLEATLNYLLTNRRQKIPSLHSLNSEEERILRYVQQSVSLNLMRDGVTPSVALDMTARNMEPGMYASNRPFINRLMDYLHRAAAVNPEYFTNAILNPHWLPPPGFYTGGFEVPEGNDGFLWDDIDDSVFSPQPQTLLELQQREQAEAALRKESFRRPSSLSDLGAAAPRSDASSPFPSLIGSLTSTRTTRPRLLGEEEYLNNSLLQPQREKNLPPAFPNNGIESLVDKMSRWKTYAQEHRDVPGPRPPTRRQRHDRQRGLVWEDDDSADDSSVLDLGGSGNPFAHLRPRLGRMF

SEQ ID NO: 649 - protein, 502 aa, Vaccinia virus
MANIINLWNGIVPTVQDVNVASITAFKSMIDETWDKKIEANTCISRKHRNIIHEVIRDFMKAYPKMDENKKSPLGAPMQWLTQYYILKNEYHKTMLAYDNGSLNTKFKTLNIYMITNVGQYILYIVFCIISGKNHDGTPYIYDSEITSNDKNLINDRIKYACKQILHGQLTIALRIRNKFMFIGSPMYLWFNVNGSQVYHDIYDRNAGFHNKEIGRLLYAFMYYLSISGRFLNDFALLKFTYLGESWTFSLSVPEYILYGLGYSVFDTIEKFSNDAILVYIRTNNRNGYDYVEFNKKGIAKVTEDKPDNDKRIHAIRLINDSTDVQRIHFGFRNMVIINNECANIQSSAENATDTGHHQDSKINIEVEDDDDVIDDDDYNPKPTPIPEPHPRPPFPRHEYHKRPKLLPVEEPDPVKKDADRIRLDNHILNTLDHNLNFIGHYCCDTAAVDRLEHHIETLGQYAVILARKINMQTLLFPWPLPTVHPHAIDGSIPPHGRSTIL

SEQ ID NO: 650 - protein, 80 aa, Vaccinia virus
MGSDIPVLNALNNSNRAIFVPIGPSNCGYSVLLIDILILLSGNRGSTSSKNKSLITSGLFINKNLAILYILLLSNLAIVL

SEQ ID NO: 651 - protein, 106 aa, Human adenovirus
MERMVWFFSLSARSLAAMLSWTYSRATHFHSGKMVVSSSGTILTRHPLLCRVIRSTLVATSPRRGSLVQQSRPPFLEQKGGRGSSMSSSGGSASMVNIPGNKSLSK

SEQ ID NO: 652 - protein, 498 aa, Variola virus
MVNIINLWNGIVPMVQDVNVASITAFKSMIDETWDKKIEANTCISRKHRNIIHEVIRDFMKAYPKMDENRKSPLGAPMQWLTQYYILKNEYYKTMLAYDNESLNTKFKTLNIYMITNVGQYILYIVFCIISGKNHNGTPYIYDSEITSNNKNLINDRIKYACKQILHGQLTMALRIRNKFMFIGSPMYLWFNVNGSHVYHEIYDGNVGFHNKEIGRLLYAFMYYLSISDRFLNDFALLKFTYLGESWTFSLSVPEYILYGLGYSVFDTIEKFSNDAILVYIKTNNRNGYDYVEFNKKGIVKVTETKPDNDKRIHAIRLINNSTDVQHIHFGFRNMVIIDNECANIQSSVENATDTGHHQDSKINIKDDDVDDDDYNPKPTPIPEPYPRPPFPRHEYYKRPKLLHVEEPDPVKKDADRIRLDNHILNTLDHNLNSIGHYCCDTAAVDRLEHHIETLGQYAVILARKINMQSLLFPWLLPTVHPHAIDGSIPPHGRSTIL

SEQ ID NO: 653 - protein, 518 aa, Human herpesvirus
MDESGRQRPASHVAADISPQGAHRRSFKAWLASYIHSLSRRASGRPSGPSPRDGAVSGARPGSRRRSSFRERLRAGLSRWRVSRSSRRRSSPEAPGPAAKLRRPPLRRSETAMTSPPSPPSHILSLARIHKLCIPVFAVNPALRYTTLEIPGARSFGGSGGYGEVQLIREHKLAVKTIREKEWFAVELVATLLVGECALRGGRTHDIRGFITPLGFSLQQRQIVFPAYDMDLGKYIGQLASLRATTPSVATALHHCFTDLARAVVFLNTRCGISHLDIKCANVLVMLRSDAVSLRPAVLADFSLVTLNSNSTISRGQFCLQEPDLESPRGFGMPAALTTANFHTLVGHGYNQPPELSVKYLNNERAEFNNRPLKHDVGLAVDLYALGQTLLELLVSVYVAPSLGVPVTRVPGYQYFNNQLSPDFAVALLAYRCVLHPALFVNSAETNTHGLAYDVPEGIRRHLRNPKIRRAFTEQCINYQRTHKAVLSSVSLPPELRPLLVLVSRLCHANPAARHSLS

SEQ ID NO: 654 - protein, 582 aa, Mumps virus
MEPSKLFTMSDNATFAPGPVINAADKKTFRTCFRILVLSVQAVTLILVIVTLGELVRMINDQGLSNQLSSIADKIRESATMIASAVGVMNQVIHGVTVSLPLQIEGNQNQLLSTLATICTGKKQVSNCSTNIPLVNDLRFINGINKFIIEDYATHDFSIGHPLNMPSFIPTATSPNGCTRIPSFSLGKTHWCYTHNVINANCKDHTSSNQYISMGILVQTASGYPMFKTLKIQYLSDGLNRKSCSIATVPDGCAMYCYVSTQLETDDYAGSSPPTQKLTLLFYNDTVTERTISPTGLEGNWATLVPGVGSGIYFENKLIFPAYGGVLPNSSLGVKSAREFFRPVNPYNPCSGPQQDLDQRALRSYFPSYFSNRRVQSAFLVCAWNQILVTNCELVVPSNNQTLMGAEGRVLLINNRLLYYQRSTSWWPYELLYEISFTFTNSGQSSVNMSWIPIYSFTRPGSGNCSGENVCPTACVSGVYLDPWPLTPYSHQSGINRNFYFTGALLNSSTTRVNPTLYVSALNNLKVLAPYGNQGLFASYTTTTCFQDTGDASVYCVYIMELASNIVGEFQILPVLTRLTIT

SEQ ID NO: 655 - protein, 372 aa, Human adenovirus
MHPVLRQMRPTPPATTATAAVAGAGAVQQQTEMDLEEGEGLARLGAPSPEQHPRVQLQKDVRPAYVPAQNLFRDRSGEEPEEMRDCRFRAGRELREGLDRQRVLRDDDFEPNEQTGISPARAHVAAANLVTAYEQTVKQERNFQKSFNNHVRTLIAREEVALGLMHLWDLAEAIVQNPNSKPLTAQLFLVVQHSRDNEAFREALLNIAEPEGRWLLELINILQSIVVQERSLSLAEKVAAINYSVLSLGKFYARKIYKTPYVPIDKEVKIDSFYMRMALKVLTLSDDLGVYRNDRIHKAVSTSRRRELSDRELMMSLRRALVGGAASGEESYFDMGADLHWQPSRRALEAAYGPEDLDEDEEEEEDAPAAGY

SEQ ID NO: 656 - protein, 250 aa, Human adenovirus
MEDINFASLAPRHGSRPFMGNWQDIGTSNMSGGAFSWGSLWSGIKNFGSTIKNYGSKAWNSSTGQMLRDKLKEQNFQQKVVDGLASGISGVVDLANQAVQNKINSKLDPRPPVEEPPPAVETVSPEGRGEKRPRPDREETLVTQIDEPPSYEEALKQGLPTTRPIAPMATGVLGQHTPVTLDLPPPADTQQKPVLPGPSAVVVTRPSRASLRRAASGPRSMRPVASGNWQSTLNSIVGLGVQSLKRRRCF

SEQ ID NO: 657 - protein, 326 aa, Vaccinia virus
MSILPVIFLSIFFYSSFVQTFNASECIDKGQYFASFMELENEPVILPCPQINTLSSGYNILDILWEKRGADNDRIIPIDNGSNMLILNPTQSDSGIYICITTNETYCDMMSLNLTIVSVSESNIDFISYPQIVNERSTGEMVCPNINAFIASNVNADIIWSGHRRLRNKRLKQRTPGIITIEDVRKNDAGYYTCVLEYIYRGKTYNVTRIVKLEVRDKIIPSTMQLPEGVVTSIGSNLTIACRVSLRPPTTDADVFWISNGMYYEEDDGDGDGRISVANKIYMTDKRRVITSRLNINPVKEEDATTFTCMAFTIPSISKTVTVSIT

SEQ ID NO: 658 - protein, 119 aa, Vaccinia virus
MNSTTHHISSQWINVCNSRTSSISYVRRSEHHSSTIAIECHRINILGIDRNRTVGCCDHLHRINNDVWCRLKFHIVTDAVYRSSHRNQRRSKSNYRQNRSQYLFLICHNLRASSMNNLH

SEQ ID NO: 659 - protein, 475 aa, Human papillomavirus
MRRKRDTHIRKKRASATQLYKTCKQAGTCPPDVIPKVEGSTIADNILKYGSIGVFFGGLGIGSGSGSGGRTGYVPLSTGTPSKPVEIPLQPIRPSVVTSVGPSDSSIVSLVEESSFIESGIPGPTSIVPSTSGFDITTSVNSTPAIIDVSAISDTTQISVTTFKNPTFTDPSVLQPPPPLEASGRLLFSNDTVTTHSYENIPLDTFVVTTDHNSIVSSTPIPGRQPAARLGLYGRAIQQVKVVDPAFLTTPTRLVTYDNPAFEGLQDTTLEFQHSDLHNAPDSDFLDIVKLHRPALTSRKTGIRVSRLGQRATLSTRSGKRIGAKVHFYHDISPIPTNDIEMQPLVTPQTPSIVTGSSINDGLYDVFLDNDVEETVLQQTYTPTSIHSNSLVSSDISTATANTTIPFSTGLDTHPGPDIALPLPSTETIFTPIVPLQPAGPIYIYGSGFILHPSYYLLKRKRKRLSYSFTDVATY

SEQ ID NO: 660 - protein, 110 aa, Vaccinia virus
MDGTLFPGDDDLAIPATEFFSTKADKKPEAKREAIVKADEDDNEETLKQRLTNLEKKITNVTTKFEQIEKCCKRNDEVLFRLENHAETLRAAMISLAKKIDVQTGRRPYE

SEQ ID NO: 661 - protein, 484 aa, Human herpesvirus
MYKGWDSEALPIQSEILNEILLYCYLTPQPPIPSETTTATSPTNIENEISNLDNSENLEELKQLSVALNIDRRCNICSIVNLCLKQNKSWIYDYSLLCYKCNYAPKTPLSLLIVSTEFLMLIRERFPNINFDGLFLNNIVSIFDFHVHFFIHRCFANTVNDHIQSENITLNHMAIIRSTLLKEDTIPHIKIKKFLTKKMNPKKTQSSELNKKLTVPMKTRFTTLLFYMWSGTNVFDRVPFTDLTIRKHRFIKNLYSNKTDIELTAGPILLAQIPFSITKNKTTSVCLLCELMAASKQDYLFLKYLHQSIMDYCQNNLKMIDRVQFVIADIFEKTKIHTHVKNLSDYSKAIFDNEFSFSDDNFTLDTHVYLILRQTGTVGVYKHFFCDPLCLANCKTINPEVLFNTTDAGEIQDLKVTICYRNEYLSIVEKHVWLAIHLFKAFQIIKPNHKNKTQITEFLKDFTNLLALHHFDIVDPIFTVNYYV

SEQ ID NO: 662 - protein, 340 aa, Vaccinia virus
MGGGVSVELPKRDPPPGVPTDEMLLNVDKMHDVIAPAKLLEYVHIGPLAKDKEDKVKKRYPEFRLVNTGPGGLSALLRQSYNGTAPNCCRTFNRTHYWKKDGKISDKYEEGAVLESCWPDVHDTGKCDVDLFDWCQGDTFDRNICHQWIGSAFNRSNRTVEGQQSLINLYNKMQTLCSKDASVPICESFLHHLRAHNTEDSKEMIDYILRQQSADFKQKYMRCSYPTRDKLEESLKYAEPRECWDPECSNANVNFLLTRNYNNLGLCNIVRCNTSVNNLQMDKTSSLRLSCGLSNSDRFSTVPVNRAKVVQHNIKHSFDLKLHLISLLSLLVIWILIVAI

SEQ ID NO: 663 - protein, 507 aa, Epstein-Barr virus
MDVHIDNQVLSGLGTPLLVHLFVPDTVMAELCPNRVPNCEGAWCQTLFSDRTGLTRVCRVFAARGMLPGRPSHRGTFTSVPVYCEEGLPELYNPFHVAALRFYDEGGLVGELQIYYLSLFEGAKRALTDGHLIREASGVQESAAAMQPMPIDPGPPGGAGIEHMPVAAAQAEHPKTYDLKQILLEITQEENRGEQRLGHAGSPALCLGLRLRAGAETKAAAETSVPKHHPALENPSNIRGSAGGEGGGGRAGTGGTVGVGSGAPSRVPVSFSKTRRAIRESRALVRGIAHIFSPHALYVVTYPELSAQGRLHRMTAVTHASPATDLAEVSILGAPEREFRFLISVALRISASFREKLAMQAWTAQQEIPVVIPTSYSRIYKNSDLIREAFFTVQTRVSWESCWVKATISNAPKTPDACLWIDSHPLYEEGASAWGKVIDSRPPGGLVGAASQLVALGTDGHCVHLATTSDGQAFLVLPGGFVIKGQLALTPEERGYILARHGIRREQ

SEQ ID NO: 664 - protein, 162 aa, Epstein-Barr virus; identical to SEQ ID NO: 560

SEQ ID NO: 665 - protein, 108 aa, Vaccinia virus
MAEEFVQQRLANNKVTIFVKYTCPFCRNALDILNKFSFKRGAYEIVDIKEFKPENELRDYFEQITGGRTVPRIFFGKTSIGGYSDLLEIDNMDALGDILSSIGVLRTC

SEQ ID NO: 666 - protein, 90 aa, Vaccinia virus
MYEHRPPSLETNSFSSTRRLFSNSDWCCKDPGRSKLTNMVNSCTLLTIGVADKQIILWFFNAMVLDKKLYTERVGRILPSSLINDLEMKL

SEQ ID NO: 667 - protein, 1193 aa, Human adenovirus
MALVQAHGAGSFHPEASDPGCQPPRRRTCESSQGAVPEPTRARRRRTTASHAAGSRAAPAARCAPSTPLLNMQEATEPPPPKRKNKGTVVAPKGHGTLQAIDISTNGPVEIKYHLNLPHALEKIMQVNLLTLPTNLTPQRLRTLDSSGLRALVLELRPCRAEVWTCLPRGLVSMTTIETEDGHADADNIVERQVQTPGLNFPLKFLVKGSQVQLIHEVHPVNRCEYCGRLYKHKHECSARRREFYFHHINSHSSNWWQEIQFFPIGSHPRTERLFLTYDVETYTWMGSFGKQLIPFMLVMKLSGDQRLVNIAYDLAMKLKWDRWRQDPQTFYCVTPEKMAVGQHFRQYRDQLQTALAVDLWSSFLKANPHVHEWALEHYALTDPTDLTFEELKKLPHVRGTPRFLELYIVGHNINGFDEIVLAAQVINNRAEVPQPFRITRNFMPRAGKILFNDVTFALPNPAYKKRVDFQLWEQGACDDMDFKYQFLKVMVRDTFALTHTSLRNAAQAYSLPVEKGCCPYKAVNQFYMLGSYRAEKDGFPLEEYWKDREEYLLNRELWEKKSQPRYDIIQETLDYCALDVLVTAELVAKLQESYAHFIRDSVGLPHAHFNIFQRPTISSNSHAIFRQIVYRAEKPNRTNLGPGLLAPSHELYDYVRASIRGGRCYPTYIGILEEPLYVYDICGMYASALTHPMPWGTPLNPYERALAVREWQMTLDDPTTISYFDKDLLPGIFTIDADPPDELMLDPLPPFCSRKGGRLCWTNEPLRGEVATSVDLITLHNRGWRVRIVPDELTTIFPEWKCVAREYVQLNIAAKERADKEKNQTMRSIAKLLSNALYGSFATKLDNKKIVFSDQMDESLMKGISAGTVNIKSSSFLETDNLSAEVMPAFEREYLPQQLALLDSDPEDSEDEQRPAPFYTPPAGTPGHVAYTYKPITFLDVEEGDMCLHTVEKVDPLVDNDRYPSHVASFVLAWTRAFVSEWAGFLYEEDRGTPLEDRPIKSVYGDTDSLFVTQRGHDLMETKGKKRIKKHGGKLVFDPDEPDLTWLVECETVCASCGADAYSPESIFLAPKLYALKCIYCPACHKTSKGKLRAKGHAAEALNYELMVNCYLADMQGADRQRFSTSRMSLKRTLASAQPGAHPFTVTETTLTRTLRPWKDRTLAALDAHRLIPYSRSRPNPRNEEVCWIEMP

SEQ ID NO: 668 - protein, 110 aa, Variola virus
MDGTLFPGDDDLAIPATEFFSTKAAKKPEAKREAIVKADGDNNEETLKQRLTNLEKKITNVTTKFEQIEKCCKRNDDVLFRLENHAETLRAAMISLAKKIDVQTGRRPYE

SEQ ID NO: 669 - protein, 484 aa, Human herpesvirus
MYKGWDSEALSIQSEIVNEILLYCYLTPQPPIPSETTTATSPTNIENEISNLESSENLEELKRLSVALNIDRRCNICSIVNLCLKQNKSWIYDYSLLCYKCNYAPKTPLSLLIVSAEFIMLIRERFPNINFDGLFQNNIVSIFDFHVHFFIHRCFANTVNDHIQSENITLNHMAIIRSTLLKEDSIPHIKIKKFLTKKMNPKKTQSPELNKKLTVPMKTRFTTLLFYMWSGTNVFDRVPFTDLTIRKHRFIKNLYSNKTDIELTAGPILLAQIPFSITKNKTTSVCLLCELMAASKQDYLFLKYLHQSIMDYCQNNLKMIDRVQFVIADIFEKTKIHMHVKNLSDYSKAIFDNEFSFSDDNFTLDTHVYLILRQTGTVGVYKHFFCDPLCLANCKTINPEVLFNTTDAGEIQDLKVTICYRNEYLSIVEKHVWLAIHLFKAFQIIKPNHKNKTQIAEFLKDFTNLLALHHFDIVDPIFTVNYYV

SEQ ID NO: 670 - protein, 830 aa, Human herpesvirus
MSKMRVLFLAVFLMNSVLMIYCDSDDYIRAGYNHKYPFRICSIAKGTDLMRFDRDISCSPYKSNAKMSEGFFIIYKTNIETYTFPVRTYKNELTFPTSYRDVGVVYFLDRTVMGLAMPVYEANLVNSRAQCYSAVAIKRPDGTVFSAYHEDNNKNETLELFPLNFKSVTNKRFITTKEPYFARGPLWLYSTSTSLNCIVTEATAKAKYPFSYFALTTGEIVEGSPFFDGSNGKHFAEPLEKLTILENYTMIEDLMNGMNGATTLVRKIAFLEKGDTLFSWEIKEENESVCMLKHWTTVTHGLRAETDETYHFISKELTAAFVASKESLNLTDPKQTCIKNEFEKIITDVYMSDYNDAYSMNGSYQIFKTTGDLILIWQPLVQKSLMVLEQGSVNLRRRRDLVDVKSRHDILYVQLQYLYDTLKDYINDALGNLAESWCLDQKRTITMLHELSKISPSSIVSEVYGRPISAQLHGDVLAISKCIEVNQSSVQLYKSMRVVDAKGVRSETMCYNRPLVTFSFVNSTPEVVLGQLGLDNEILLGDHRTEECEIPSTKIFLSGNHAHVYTDYTHTNSTPIEDIEVLDAFIRLKIDPLENADFKLLDLYSPDELSRANVFDLENILREYNSYKSALYTIEAKIATNTPSYVNGINSFLQGLGAIGTGLGSVISVTAGALGDIVGGVVSFLKNPFGGGLMLILAIVVVVIIIVVFVRQKHVLSKPIDMMFPYATNPVTTVSSVTGTTVVKTPSVKDADGGTSVAVSEKEEGMADVSGQISGDEYSQEDALKMLKAIKSLDESYRRKPSSSESHASKPSLIDRIRYRGYKSVNVEEA

SEQ ID NO: 671 - protein, 149 aa, Orf virus
MHPSLRRLLGALALVAAGFALGALFRPAAPPLPAAFAEAGPVRANGSASVTCLTVGDARHMAAVADAEGRLLSPAYPQGEGMHASFSSARKGALLLHVATVTVYDVRGLRDDFELTCVAVVGGYNSATAAARPRSEWLRQLERLRRAEL

SEQ ID NO: 672 - protein, 404 aa, Epstein-Barr virus
MLKCKQPGARFIHGAVHLPSGQIVFHTIHSPTLASALGLPGENVPIPALFRASGLNVRESLPMTNMRAPIISLARLILAPNPYILEGQLTVGMTQDNGIPVLFARPVIEVKSGPESNIKASSQLMIAEDSCLNQIAPFSASEHPAFSMVESVKRVRVDEGANTRRTIRDILEIPVTVLSSLQLSPTKSILKKAPEPPPPEPQATFDATPYARIFYDIGRQVPKLGNAPAAQVSNVLIANRSHNSLRLVPNPDLLPLQHLYLKHVVLKSLNLENIVQDFEAIFTSPSDTISEAETKAFEKLVEQAKNTVENIVFCLNSICSTSTLPDVVPDVNNPNISLALEKYFLMFPPSGTIMRNVRFATPIVRLLCQGAELGTMAQFLGKYIKVKKETGMYTLVKLYYLLRI

SEQ ID NO: 673 - protein, 318 aa, Vaccinia virus
MTTVPVTDIQNDLITEFSEDNYPSNKNYEITLRQMSILTHVNNVVDREHNAAVVSSPEEISSQLNEDLFPDDDSPATIIERVQPHTTIIDDTPPPTFRRELLISEQRQQREKRFNITVSKNAEAIMESRSMITSMPTQTPSLGVVYDKDKRIQMLEDEVVNLRNQRSNTKSSDNLDNFTKILFGKTPYKSTEVNKRIAIVNYANLNGSPLSVEDLDVCSEDEIDRIYKTIKQYHESRKRKIIVTNVIIIVINIIEQALLKLGFEEIKGLSTDITSEIIDVEIGDDCDAVASKLGIGNSPVLNIVLFILKIFVKRIKII

SEQ ID NO: 674 - protein, 128 aa, Vaccinia virus
MALMAITKNVKYFSMLGIWFFTLIDIWFLAKMIDIFLSEDSKILLVAVSIKMKLVSISNFILELIGVAKCTLYVISPLMRSICVSISDTRSVNSFTLLIITVSPSLDNANVPSKSQMERFNCSSFRIK

SEQ ID NO: 675 - protein, 148 aa, Human papillomavirus
MLFPNSEERPYKLQALCDEVNISIHDINLDCVFCQRGLYRSEVYDFAFSDLCIVYRKDKPYGVCQPCLKFYSKIREYRRYRQSVYGTTLENLTNKQLCNILIRCGKCQKPLCPLEKQKHVDEKKRFHQIAEQWTGRCTRCWRPSATVV

SEQ ID NO: 676 - protein, 140 aa, Variola virus
MVSILNTLRFLEKTSFYNCNDSITKEKIKIKHKGMSFVFYKPKHSTVVKYLSGGCIYHDDLVVLGKVTINDLKMMLFYMDLSYHGVTSSGVIYKLGSSIDRLSLNRTIVTKVNNNYNNYNNYNNYYNCYNYDDTFFDDDD

SEQ ID NO: 677 - protein, 485 aa, Human herpesvirus
MAYKGWNSDSFSMNSELFNEILLYAHLDSSGIDSDDLNTNPNTLENEINSVEKTLNIEELKKITTALNIDNRCNICSIINICLRHETDKMWIYDYALLCYKCNAAPRTPLAVVIIATEFMQLIQKHFLNINFDGLFLNNILSILDFHVHFFINRCFSNTNDDLLHNENITLYHMAILKSLLLEDESIPNIRIKKFKLKGKPTKKQHGNAILEKQTLPLNTHFTHLIFYMWAGTNIFDRISLTDLAIKKRQILKAIYSTKNELNCSAGPILLSQIPISITKNATSSVCLLCELMTSSQKNFDLLQFIYTSVINYCQNNLKMIDRIQFVLANLLDLARIYTNVKTTSDCSKIVLANEQEFSNSDFVIDCHSFLILKQVGPVGLYKHFFCDPLCIANIKTIKPHILFYTTESCILQDFKVAICYQNEYLNSVEKHVWLAIHFFKAFQVSKLNHKNKTLISDFLKDFTQLLADQNFEIVDPTFTIHYYV

SEQ ID NO: 678 - protein, 857 aa, Epstein-Barr virus
MTRRRVLSVVVLLAALACRLGAQTPEQPAPPATTVQPTATRQQTSFPFRVCELSSHGDLFRFSSDIQCPSFGTRENHTEGLLMVFKDNIIPYSFKVRSYTKIVTNILIYNGWYADSVTNRHEEKFSVDSYETDQMDTIYQCYNAVKMTKDGLTRVYVDRDGVNITVNLKPTGGLANGVRRYASQTELYDAPGWLIWTYRTRTTVNCLITDMMAKSNSPFDFFVTTTGQTVEMSPFYDGKNKETFHERADSFHVRTNYKIVDYDNRGTNPQGERRAFLDKGTYTLSWKLENRTAYCPLQHWQTFDSTIATETGKSIHFVTDEGTSSFVTNTTVGIELPDAFKCIEEQVNKTMHEKYEAVQDRYTKGQEAITYFITSGGLLLAWLPLTPRSLATVKNLTELTTPTSSPPSSPSPPAPPAARGSTSAAVLRRRRRDAGNATTPVPPAAPGKSLGTLNNPATVQIQFAYDSLRRQINRMLGDLARAWCLEQKRQNMVLRELTKINPTTVMSSIYGKAVAAKRLGDVISVSQCVPVNQATVTLRKSMRVPGSETMCYSRPLVSFSFINDTKTYEGQLGTDNEIFLTKKMTEVCQATSQYYFQSGNEIHVYNDYHHFKTIELDGIATLQTFISLNTSLIENIDFASLELYSRDEQRASNVFDLEGIFREYNFQAQNIAGLRKDLDNAVSNGRNQFVDGLGELMDSLGSVGQSITNLVSTVGGLFSSLVSGFISFFKNPFGGMLILVLVAGVVILVISLTRRTRQMSQQPVQMLYPGIDELAQQHASGEGPGINPISKTELQAIMLALHEQNQEQKRAAQRAAGPSVASRALQAARDRFPGLRRRRYHDPETAAALLGEAETEF

SEQ ID NO: 679 - protein, 634 aa, Human adenovirus
MALSVNDCARLTGQTVPTMDYFLPLRNIWNRVREFPRASTTAAGITWMSRYLYGYHRLMLEDLAPGAPATQRWPLYRQPPPHFLVGYQYLVRTCNDYVFDSRAFSRLRYSEVVQPGLQTVNWSLMANCTYTINTGAYHRFVDMDDFQDTLTRVQQAILAERVVADLALVQPLRGVGVTRMEDSASAANDDIERLMHDYYKNLSRCQGQAWGMAERLRIQQAGPKDLVLLATIRRLKNAYFNYIISNRNCNSVHRAATCLSLPCDCDWLDAFLQKFSDPVDLDVLTSPTPQLIRCIVSALSLPNGDPPYYREMTGGVFTLRPREQGRAVTETMRRRRGEMIERFVDRLPVRRRRRRAPPPPPPPEEIQEEVVMEQEEEEAPGDFEREVRATIAELIRLLEDELTVSARNAQFFNFAVDFYEAMERLEAIGNISEMPLRRWIMYFFVTEHIATTLNYLFQRLRNYAVFTRHVELNLAQVVMRARDVDGDVVYSRVWNESGLGAFSQLMGRISNDLAATVERAGRGDLQEEEIEQFMSEIAYQDNSGDVQEILRQAAVNDAEIDSVELSFRFKVTGPVVFTQRRQIQDVNRRVVAHASALRAQHRDLPERHADVPLPPLPMGPEPPLPPGARPRHRF

SEQ ID NO: 680 - protein, 404 aa, Epstein-Barr virus; identical to SEQ ID NO: 672

SEQ ID NO: 681 - protein, 245 aa, Vaccinia virus
MTMTRLLLVYIIILNLNVIPVIISIGKDKDVCELLISSDISCACVELNSYHVAILPMDVSFFTKGNASLIILLFDFSIDAAPLLRSVTDNNVIISRHQRLHDELPSSNWFKFYISIKSDYCSILYMVVDGSVMHAIADNRTYANISKNILDNTTINDECRCCYFEPQIRILDRDEMLNGSSCDMNRHCIMMNLPDVGKFGSSMLGKYEPDMIKIALSVAGNLIRNRDYIPGRRGYSYYVYGIASR

SEQ ID NO: 682 - protein, 61 aa, Vaccinia virus
MTFINNDAYSTLGINSFDISKKFISKILIIVINKNTILRYLWSVSEYSVHPRIFYQSLFHQ

SEQ ID NO: 683 - protein, 278 aa, Human herpesvirus
MFCTSPATRGDSSESKPGASVDVNGKMEYGSAPGPLNGRDTSRGPGAFCTPGWEIHPARLVEDINRVFLCIAQSSGRVTRDSRRLRRICLDFYLMGRTRQRPTLACWEELLQLQPTQTQCLRATLMEVSHRPPRGEDGFIEAPNVPLHRSALECDVSDDGGEDDSDDDGSTPSDVIEFRDSDAESSDGEDFIVEEESEESTDSCEPDGVPGDCYRDGDGCNTPSPKRPQRAIERYAGAETAEYTAAKALTALGEGGVDWKRRRHEAPRRHDIPPPHGV

SEQ ID NO: 684 - protein, 184 aa, Variola virus
MMTPENDEEQTSVFSATVYGDKIQGKNKRKRVIGICIRISMVISLLSMITMSAFLIVRLNQCMSANEAAITDATAVAAALSTHRKVASSTTQYKHQESCNGLYYQGSCYIFHSDYQLFSDAKANCATESSTLPNKSDVLTTWLIDYVEDTWGSDGNPITKTTTDYQDSDVSQEVRKYFCVKTMN

SEQ ID NO: 685 - protein, 467 aa, Human herpesvirus
MFVPWQLGTITRHRDELQKLLAASLLPEHPEESLGNPIMTQIHQSLQPSSPCRVCQLLFSLVRDSSTPMGFFEDYACLCFFCLYAPHCWTSTMAAAADLCEIMHLHFPEEEATYGLFGPGRLMGIDLQLHFFVQKCFKTTAAEKILGISNLQFLKSEFIRGMLTGTITCNFCFKTSWPRTDKEEATGPTPCCQITDTTTAPASGIPELARATFCGASRPTKPSLLPALIDIWSTSSELLDEPRPRLIASDMSELKSVVASHDPFFSPPLQADTSQGPCLMHPTLGLRYKNGTASVCLLCECLAAHPEAPKALQTLQCEVMGHIENNVKLVDRIAFVLDNPFAMPYVSDPLLRELIRGCTPQEIHKHLFCDPLCALNAKVVSEDVLFRLPREQEYKKLRASAAAGQLLDANTLFDCEVVQTLVFLFKGLQNARVGKTTSLDIIRELTAQLKRHRLDLAHPSQTSHLYA

SEQ ID NO: 686 - protein, 394 aa, Human herpesvirus
MGGAAARLGAVILFVVIVGLHGVRSKYALVDASLKMADPNRFRGKDLPVLDQLTDPPGVRRVYHIQAGLPDPFQPPSLPITVYYAVLERACRSVLLNAPSEAPQIVRGASEDVRKQPYNLTIAWFRMGGNCAIPITVMEYTECSYNKSLGACPIRTQPRWNYYDSFSAVSEDNLGFLMHAPAFETAGTYLRLVKINDWTEITQFILEHRAKGSCKYALPLRIPPSACLSPQAYQQGVTVDSIGMLPRFIPENQRTVAVYSLKIAGWHGPKAPYTSTLLPPELSETPNATQPELAPEDPEDSALLEDPVGTVAPQIPPNWHIPSIQDAATPYHPPATPNNMGLIAGAVGGSLLAALVICGIVYWMRRHTQKAPKRIRLPHIREDDQPSSHQPLFY

SEQ ID NO: 687 - protein, 367 aa, Human papillomavirus
MMETLSQRLSVCQDKILEHYETDSTCLSDHIQYWKLIRLECAVFYKAREMGIKTLNHQVVPTQAISKAKAMQAIELQLMLETLNTTEYRTETWTLQETSIELYTTVPQGCFKKHGVTVEVQFDGDKQNTMHYTNWTHIYLLEDSTCTVVKGLVNYKGIYYVHQGVETYYVNFREEAKKYGKKNIWEVHVGGQVIVCPESVFSSTELSTAEIATQLHAYNTTETHTKACSVGTTETQKTNHKRPRGGTELPCNPTKRVRLSAVDSVDRGVYSTSDCTNKDRCGSCSTTTPIVHLKGDANTLKCLRYRLGKYKALYQDASSTWRWTCTNDKKQIAIVTLTYTTEYQRDKFLTTVKIPNTVTVSKGYMSI

SEQ ID NO: 688 - protein, 253 aa, Variola virus
MKQYIVLACMCLAAAAMPASLQQSSSSCTEEENKHYMGIDVIIKVTKQDQTPTNDKICQSVTEITESESDPEVESEDDSTSVEDVDPPTTYYSIIGGGLRMNFGFTKCPQIKSISESANGNAVNARLSSVPLGQGKDSPAITRAEALAMIKDCELSIDIRCSEEEKDSDIQTHPVLESNISHKKVSYEDIIGSTIVDTKCVKNLEFSVRIGDMCKESSDLEVKDGFKYVDGSVSEGVTDDTSLIDSTKLKSCV

SEQ ID NO: 689 - protein, 117 aa, Vaccinia virus
MITLFLILCYFILIFNIIVPAISEKMRRERAAYVNYKRLNKNFICVDDRLFSYNFTTSGIKAKVAVDNKNVPIPCSKINEVNNNKNVDTLYCDKDRDDIPGFARSCYRAYSDLFFTT

SEQ ID NO: 690 - protein, 88 aa, Vaccinia virus
MIFFNPVSFRLVRNILLNFDSTVMSKSSCGNTSINIVSNLIILLSTSSYDPNSGIDVSHALTTQITKKSHAPGYTLYKKLSFFSSVFF

SEQ ID NO: 691 - protein, 393 aa, Human herpesvirus
MNDVDATDTFVGQGKFRGAISTSPSHIMQTCGFIQQMFPVEMSPGIESEDDPNYDVNMDIQSFNIFDGVHETEAEASVALCAEARVGINKAGFVILKTFTPGAEGFAFACMDSKTCEHVVIKAGQRQGTATEATVLRALTHPSVVQLKGTFTYNKMTCLILPRYRTDLYCYLAAKRNLPICDILAIQRSVLRALQYLHNNSIIHRDIKSENIFINHPGDVCVGDFGAACFPVDINANRYYGWAGTIATNSPELLARDPYGPAVDIWSAGIVLFEMATGQNSLFERDGLDGNCDSERQIKLIIRRSGTHPNEFPINPTSNLRRQYIGLAKRSSRKPGSRPLWTNLYELPIDLEYLICKMLSFDARHRPSAEVLLNHSVFQTLPDPYPNPMEVGD

SEQ ID NO: 692 - protein, 216 aa, Variola virus
MILVPLITVTVVAGTILVCYILYICRKKIRTVYNDNKIIMTKLKKIKSSNSSKSSKSTDNESDWEDHCSAMEQNNDVDNISRNEILDDDSFAGSLIWDNESNVIAPSTEHIYDSVAGSTRLINNDCNEQTIYQNTTVINETETIEVLNEDTKQNPSYSSNPFVNYNKTSICSKSNPFITELNNKFSENNPFRRAHSDDYLNKQEHDDIESSVVSLV

SEQ ID NO: 693 - protein, 100 aa, Human cytomegalovirus
GRSLTYPGSIQTDKKSVQRRGLFFFSNGKSESYTFLVVTASFLVVMAVVVNIYLQIQEMRKKKEDKSNGIISDHIYGGISGHHCVSKDDLYNREGYGFKG

SEQ ID NO: 694 - protein, 550 aa, Human herpesvirus
MDRGAVVGFLLGVCVVSCLAGTPKTSWRRVSVGEDVSLLPAPGPTGRGPTQKLLWAVEPLDGCGPLHPSWVSLMPPKQVPETVVDAACMRAPVPLAMAYAPPAPSATGGLRTDFVWQERAAVVNRSLVIHGVRETDSGLYTLSVGDIKDPARQVASVVLVVQPAPVPTPPPTPADYDEDDNDEGEDESLAGTPASGTPRLPPPPAPPRSWPSAPEVSHVRGVTVRMETPEAILFSPGETFSTNVSIHAIAHDDQTYSMDVVWLRFDVPTSCAEMRIYESCLYHPQLPECLSPADAPCAASTWTSRLAVRSYAGCSRTNPPPRCSAEAHMEPVPGLAWQAASVNLEFRDASPQHSGLYLCVVYVNDHIHAWGHITISTAAQYRNAVVEQPLPQRGADLAEPTHPHVGAPPHAPPTHGALRLGAVMGAALLLSALGLSVWACMTCWRRRAWRAVKSRASGKGPTYIRVADSELYADWSSDSEGERDQVPWLAPPERPDSPSTNGSGFEILSPTAPSVYPRSDGHQSRRQLTTFGSGRPDRRYSQASDSSVFW

SEQ ID NO: 695 - protein, 502 aa, Human papillomavirus
MSLWRSNEATVYLPPVSVSKVVSTDEYVTRTNIYYHAGSSRLLAVGHPYYAIKKQDSNKIAVPKVSGLQYRVFRVKLPDPNKFGFPDTSFYDPASQRLVWACTGVEVGRGQPLGVGISGHPLLNKLDDTENSNKYVGNSGTDNRECISMDYKQTQLCLIGCRPPIGEHWGKGTPCNANQVKAGECPPLELLNTVLQDGDMVDTGFGAMDFTTLQANKSDVPLDICSSICKYPDYLKMVSEPYGDMLFFYLRREQMFVRHLFNRAGTVGETVPADLYIKGTTGTLPSTSYFPTPSGSMVTSDAQIFNKPYWLQRAQGHNNGICWSNQLFVTVVDTTRSTNMSVCSAVSSSDSTYKNDNFKEYLRHGEEYDLQFIFQLCKITLTADVMTYIHSMNPSILEDWNFGLTPPPSGTLEDTYRYVTSQAVTCQKPSAPKPKDDPLKNYTFWEVDLKEKFSADLDQFPLGRKFLLQAGLKARPNFRLGKRAAPASTSKKSSTKRRKVKS

SEQ ID NO: 696 - protein, 304 aa, Vaccinia virus
MPQQLSPINIETKKAISNARLKPLDIHYNESKPTTIQNTGKLVRINFKGGYISGGFLPNEYVLSSLRIYWGKEDDYGSNHLIDVYKYSGEINLVHWNKKKYSSYEEAKKHDDGLIIISIFLQVSDHKNVYFQKIVNQLDSIRSTNTSAPFDSVFYLDNLLPSKLDYFTYLGTTINHSADAVWIIFPTPINIHSDQLSKFRTLLSSSNHDGKPHYITENYRNPYKLNDDTQVYYSGEIIRAATTSPARENYFMRWLSDLRETCFSYYQKYIEGNKTFAIIAIVFVFILTAILFFMSQRYSREKQN

SEQ ID NO: 697 - protein, 204 aa, Vaccinia virus
MSRGALIVFEGLDKSGKTTQCMNIMESIPANTIKYLNFPQRSTVTGKMIDDYLTRKKTYNDHIVNLLFCANRWEFASFIQEQLEQGITLIVDRYAFSGVAYAAAKGASMTLSKSYESGLPKPDLVIFLESGSKEINRNVGEEIYEDVAFQQKVLQEYKKMIEEGDIHWQIISSEFEEDVKKELIKNIVIEAIHTVTGPVGQLWM

SEQ ID NO: 698 - protein, 86 aa, Torque teno virus
MMMNQLNSLQKLGQETRYPLAEPSKSVAVPLSITSSKSKRRRRHSRSRERKTRKKTRRKQLSSSSSKSSSDKENCSSSSSGGSGDW

SEQ ID NO: 699 - protein, 1396 aa, Human herpesvirus
MTTVSCPANVITTTESDRIAGLFNIPAGIIPTGNVLSTIEVCAHRCIFDFFKQIRSDDNSLYSAQFDILLGTYCNTLNFVRFLELGLSVACICTKFPELAYVRDGVIQFEVQQPMIARDGPHPVDQPVHNYMVKRIHKRSLSAAFAIASEALSLLSNTYVDGTEIDSSLRIRAIQQMARNLRTVLDSFERGTADQLLGVLLEKAPPLSLLSPINKFQPEGHLNRVARAALLSDLKRRVCADMFFMTRHAREPRLISAYLSDMVSCTQPSVMVSRITHTNTRGRQVDGVLVTTATLKRQLLQGILQIDDTAADVPVTYGEMVLQGTNLVTALVMGKAVRGMDDVARHLLDITDPNTLNIPSIPPQSNSDSTTAGLPVNARVPADLVIVGDKLVFLEALERRVYQATRVAYPLIGNIDITFIMPMGVFQANSMDRYTRHAGDFSTVSEQDPRQFPPQGIFFYNKDGILTQLTLRDAMGTICHSSLLDVEATLVALRQQHLDRQCYFGVYVAEGTEDTLDVQMGRFMETWADMMPHHPHWVNEHLTILQFIAPSNPRLRFELNPAFDFFVAPGDVDLPGPQRPPEAMPTVNATLRIINGNIPVPLCPISFRDCRGTQLGLGRHTMTPATIKAVKDTFEDRAYPTIFYMLEAVIHGNERNFCALLRLLTQCIRGYWEQSHRVAFVNNFHMLMYITTYLGNGELPEVCINIYRDLLQHVRALRQTITDFTIQGEGHNGETSEALNNILTDDTFIAPILWDCDALIYRDEAARDRLPAIRVSGRNGYQALHFVDMAGHNFQRRDNVLIHGRPVRGDTGQGIPITPHHDREWGILSKIYYYIVIPAFSRGSCCTMGVRYDRLYPALQAVIVPEIPADEEAPTTPEDPRHPLHAHQLVPNSLNVYFHNAHLTVDGDALLTLQELMGDMAERTTAILVSSAPDAGAATATTRNMRIYDGALYHGLIMMAYQAYDETIATGTFFYPVPVNPLFACPEHLASLRGMTNARRVLAKMVPPIPPFLGANHHATIRQPVAYHVTHSKSDFNTLTYSLLGGYFKFTPISLTHQLRTGFHPGIAFTVVRQDRFATEQLLYAERASESYFVGQIQVHHHDAIGGVNFTLTQPRAHVDLGVGYTAVCATAALRCPLTDMGNTAQNLFFSRGGVPMLHDNVTESLRRITASGGRLNPTEPLPIFGGLRPATSAGIARGQASVCEFVAMPVSTDLQYFRTACNPRGRASGMLYMGDRDADIEAIMFDHTQSDVAYTDRATLNPWASQKHSYGDRLYNGTYNLTGASPIYSPCFKFFTPAEVNTNCNTLDRLLMEAKAVASQSSTDTEYQFKRPPGSTEMTQDPCGLFQEAYPPLCSSDAAMLRTAHAGETGADEVHLAQYLIRDASPLRGCLPLPR

SEQ ID NO: 700 - protein, 277 aa, Variola virus
MLRVRILLIYLCTFVVITSTKTIEYTACNDTIIIPCTIDNPTKYIRWKLDNHNILTYNKTSKTIILSKWHTSAKLHSLSDNDVSLIIKYKDILPGTYTCEDNTGIKSTVKLVQRHTNWFNDHHTMLMFIFTGITLFLLFLEIAYTSISVVFSTNLGILQVFGCIIAMIELCGAFLFYPSMFTLRHIIGLLMMTLPSIFLIITKVFSFWLLCKLSCAVHLIIYYQLAGYILTVLGLGLSLKECVDGTLLLSGLGTIMVSEHFSLLFLVCFPSTQRDYY

SEQ ID NO: 701 - protein, 316 aa, Human cytomegalovirus
MLRLLFTLVLLALYGPSVDASRDYVHVRLLSYRGDPLVFKHTFSGVRRPFTELGWAACRDWDSMHCTPFWSTDLEQMTDSVRRYSTVSPGKEVTLQLHGNQTVQPSFLSFTCRLQLEPVVENVGLYVAYVVNDGERPQQFFTPQVDVVRFALYLETLSRIVEPLESGRLTVEFDTPDLALAPDLVSSLFVAGHGETDFYMNWTLRRSQTHYLEEMALQVEILKPRGVRHRAIIHHPKLQPGVGLWIDFCVYRYNARLTRGYVRYTLSPKARLPAKAEGWLVSLDRFIVQYLNTLLITMMAAIWARVLITYLVSRRR

SEQ ID NO: 702 - protein, 545 aa, Human herpesvirus
MARGAGLVFFVGVWVVSCLAAAPRTSWKRVTSGEDVVLLPAPAERTRAHKLLWAAEPLDACGPLRPSWVALWPPRRVLETVVDAACMRAPEPLAIAYSPPFPAGDEGLYSELAWRDRVAVVNESLVIYGALETDSGLYTLSVVGLSDEARQVASVVLVVEPAPVPTPTPDDYDEEDDAGVTNARRSAFPPQPPPRRPPVAPPTHPRVIPEVSHVRGVTVHMETLEAILFAPGETFGTNVSIHAIAHDDGPYAMDVVWMRFDVPSSCADMRIYEACLYHPQLPECLSPADAPCAVSSWAYRLAVRSYAGCSRTTPPPRCFAEARMEPVPGLAWLASTVNLEFQHASPQHAGLYLCVVYVDDHIHAWGHMTISTAAQYRNAVVEQHLPQRQPEPVEPTRPHVRAPHPAPSARGPLRLGAVLGAALLLAALGLSAWACMTCWRRRSWRAVKSRASATGPTYIRVADSELYADWSSDSEGERDGSLWQDPPERPDSPSTNGSGFEILSPTAPSVYPHSEGRKSRRPLTTFGSGSPGRRHSQASYPSVLW

SEQ ID NO: 703 - protein, 425 aa, Human adenovirus
MSKKRARVDDGFDPVYPYDADNAPTVPFINPPFVSSDGFQEKPLGVLSLRLADPVTTKNGEITLKLGEGVDLDDSGKLIANTVNKAIAPLSFSNNTISLNMDTPLYTKDGKLSLQVSPPLSILKSTILNTLALAFGSGLGLSGSALAVQLASPLTFDDKGNIKITLNRGLHVTTGDAIESNISWAKGIKFEDGAIATNIGKGLEFGTSSTETGVNNAYPIQVKLGSGLSFDSTGAIMAGNKDYDKLTLWTTPDPSPNCQILAENDAKLTLCLTKCDSQILATVSVLVVRSGNLNPITGTVSSAQVFLRFDANGVLLTEHSTLKKYWGYKQGDSIDGTPYTNAVGFMPNSTAYPKTQSSTTKNNIVGQVYMNGDVSKPMLLTITLNGTDDTTSAYSMSFSYTWTNGSYIGATFGANSYTFSYIAQQ

SEQ ID NO: 704 - protein, 304 aa, Variola virus
MSQQLSPINIETKKAISNARLKPLNIHYNESKPTTIQNTGKLVRINFKGGYLSGGFLPNEYVLSSLHIYWGKEDDYGSNHLIDVYKYSGEINLVHWNKKKYSSYEEAKKHDDGLIIISIFLQVSDHKNVYFQKIVNQLDSIRTANTSAPFDSVFYLDNLLPSKLDYFKYLGTTINHSADAVWIIFPTPINIHSDQLSKFRTLLSLSNHEGKPHYITENYRNPYKLNDDTEVYYSGEIIRAATTSPARENYFMRWLSDLRETCFSYYQKYIEGNKTFAIIAIVFVYILTAILFLMSRRYSREKQN

SEQ ID NO: 705 - protein, 166 aa, Vaccinia virus
MDSGIYETPINYKKSNVSAVSVNNTIFVTGGLFINNSNSTIVVNNMEKLDIYKDKQWSIIEMPMARVYHGIDSTFGMLYFAGGLSVTEQYGNLEKNNEISCYNPRTNKWFDISYTIYKISISSLCKLNNVFYVFSKDIGYVEKYDGAWKLVHDRLPAIKALSTSPY

SEQ ID NO: 706 - protein, 57 aa, Torque teno virus
MFGDPKPYNPSSNDWKEEYEACKYWDRPPRGNLRDTPYYPWAPKENQYRVNFKLGFQ

SEQ ID NO: 707 - protein, 747 aa, Human herpesvirus
MSLIMFGRTLGEESVRYFERLKRRRDERFGTLESPTPCSTRQGSLGNATQIPFLNFAIDVTRRHQAVIPGIGTLHNCCEYIPLFSATARRAMFGAFLSSTGYNCTPNVVLKPWRYSVNANVSPELKKAVSSVQFYEYSPEEAAPHRNAYSGVMNTFRAFSLSDSFCQLSTFTQRFSYLVETSFESIEECGSHGKRAKVDVPIYGRYKGTLELFQKMILMHTTHFISSVLLGDHADRVDCFLRTVFNTPSVSDSVLEHFKQKSTVFLVPRRHGKTWFLVPLIALVMATFRGIKVGYTAHIRKATEPVFEGIKSRLEQWFGANYVDHVKGESITFSFTDGSYSTAVFASSHNTNGIRGQDFNLLFVDEANFIRPDAVQTIVGFLNQTNCKIIFVSSTNTGKASTSFLYNLRGSSDQLLNVVTYVCDDHMPRVLAHSDVTACSCYVLNKPVFITMDGAMRRTADLFMADSFVQEIVGGRKQNSGGVGFDRPLFTKTARERFILYRPSTVANCAILSSVLYVYVDPAFTSNTRASGTGVAIVGRYKSDWIIFGLEHFFLRALTGTSSSEIGRCVTQCLGHILALHPNTFTNVHVSIEGNSSQDSAVAISLAIAQQFAVLEKGNVLSSAPVLLFYHSIPPGCSVAYPFFLLQKQKTPAVDYFVKRFNSGNIIASQELVSLTVKLGVDPVEYLCKQLDNLTEVIKGGMGNLDTKTYTGKGTTGTMSDDLMVALIMSVYIGSSCIPDSVFMPIK

SEQ ID NO: 708 - protein, 240 aa, Variola virus
MAFDISVNASKTINALVYFSTQQNKLVIRNEVNDTHYTVEFDRDKVVDTFISYNRHNDSIEIRGVLPEETNIGCTVNTPVSMTYLYNKYSFKLILAEYIRHRNTVSGNIYSALMTLDDLVIKQYGDIDLLFNEKLKVDSDSGLFDFVNFVKDIICCDSRIVVALSSLVSKHWELTNKKYRCMALAEHIADSIPISELSRPRYNLCKYLRGHTESIEDEFDYFEDDDSSTCSVVTDRETDV

SEQ ID NO: 709 - protein, 327 aa, Human cytomegalovirus
MGGGRLPPLWLPLLIAWSEWGNCCLDAPPVVRSPCLQPVRDRNRERNPGSPQLLPYGDRLEVACIFPAHDWPEVSIRVHLCYWPEIVRSLVVDARSGQVLHNDASCYIAGGRWRFEDGGAAQRLSLSFRLITETAGTYTCVLGNETHSLATETTALVADVHDLRHSDRSCDLAFGSRSQTRYLWTPDPSRLRSINCGWEGERHRVVHYIPGTSGLLPSCEEDERELCVPFISQSIADNNCSRRHRVDGARRRYHLRRDYWLTDPKIGLLAAGSVALTSLCHLLCYWCSESYRRLNTEEESEAAEETAAGEASAVAAAAVSEEEQRRE

SEQ ID NO: 710 - protein, 694 aa, Human herpesvirus
MLLRLWVFVLLTPCYGWRPLNISNSSHCRNGNFENPIVRPGFITFNFYTKNDTRIYQVPKCLLGSDITYHLFDAINTTESLTNYEKRVTRFYEPPMNDILRLSPVPSVKQFNLDRSIQPQVVYSLNMYPSQGIYYVRVVEVRQMQYDNVSCKLPNSLKELIFPVQVRCAKITRYVGEDIYTHFFTPDFMILYIQNPAGDLTMMYGNTTSINFKAPYKKSSFIFKQTLTDDLLLIVEKDVIDVQYRFISDATFVDETLNDVDEVEALLLKFNNLGIQTLLRGDCKKPNYAGIPQMMFLYGIVHFSYSTKNTGPMPVLRVLKTHENLLSIDSFVNRCVNVSEGTLQYPKMKEFLKYEPSDYSYITKNKSISVSTLLTYLATAYESNVTISKYKWTDIANTLQNIYEKHMFFTNLTFSDRETLFMLAEIANIIPTDERMQRHMQLLIGNLCNPVEIVSWARMLTADRAPNLENIYSPCASPVRRDVTNSFLKTVLTYASLDRYRSDMMEMLSVYRPPNMERVAAIQCLSPSEPAASLTLPNVTFVISPSYVIKGVSLTITTTIVATSIIITAIPLNSTCVSTNYKYAGQDLLVLRNISSQTCEFCQSVVMEYDDIDGPLQYIYIKNIDELKTLTDPNNNLLVPNTRTHYLLLAKNGSVFEMSEVGIDIDQVSIILVIIYILIAIIALFGLYRLIRLC

SEQ ID NO: 711 - protein, 415 aa, Human adenovirus
MHPVLRQMRPPPQQRQEQEQRQTCRAPSPSPTASGGATSAADAAADGDYEPPRRRTRHYLDLEEGEGLARLGAPSPERHPRVQLKRDTREAYVPRQNLFRDREGEEPEEMRDRKFHAGRELRHGLNRERLLREEDFEPDARTGISPARAHVAAADLVTAYEQTVNQEINFQKSFNNHVRTLVAREEVAIGLMHLWDFVSALEQNPNSKPLMAQLFLIVQHSRDNEAFRDALLNIVEPEGRWLLDLINILQSIVVQERSLSLADKVAAINYSMLSLGKFYARKIYHTPYVPIDKEVKIEGFYMRMALKVLTLSDDLGVYRNERIHKAVSVSRRRELSDRELMHSLQRALAGTGSGDREAESYFDAGADLRWAPSRRALEAAGAGPGLAVAPARAGNVGGVEEYDEDDEYEPEDGEY

SEQ ID NO: 712 - protein, 233 aa, Human adenovirus
MSKDIPTPYMWSFQPQMGLAAGAAQDYSSKMNWLSAGPHMISRVNGVRARRNQILLEQAALTATPRNQLNPPSWPAALIYQENPPPTTVLLPRDAQAEVHMTNAGAQLAGGARHSFRYKGRTEPYPSPAIKRVLIRGKGIQLNDEVTSPLGVRPDGVFQLGGSGRSSFTARQAYLTLQSSSSAPRSGGIGTLQFVEEFTPSVYFNPFSGSPGHYPDAFIPNFDAVSESVDGYD

SEQ ID NO: 713 - protein, 116 aa, Vaccinia virus
MDGVIVYCLNALVKHGEEINHIKNDFMIKPCCERVCEKVKNVHIGGQSKNNTVIADLPYMDNAVSDVCNSLYKKNVSRISRFANLIKIDDDDKTPTGVYNYFKPKCYSCYHIYRKG

SEQ ID NO: 714 - protein, 71 aa, Vaccinia virus
MNSIPVPTLTETSRSFIIIPLSVSITHCLTRDSFGIVRTISSNGITAHLVNSLYILCNMALLLPYTINLLL

SEQ ID NO: 715 - protein, 541 aa, Human herpesvirus
MEFPYHSTVSYNGVTFYFNERATRAYFICGGCLISIPRKHGGEIAKFGHVVRGVGPGDRSVASYVRSELNRTGKTWAVSSNNNCVFLDRVALLAAGSGAVDRDLCGTFDVEVEDPTLADYLVSLPVTHLTLVAGVDVTRENKLKLFPTPTAINTTNGFMYVPNEASFSLVYMRMLELPESLQELVSGLFDGTPEIRDALNGSNDDEKTSIIVSRRAADVVTEDVKADDVPISGEPYSEKQPRRRKKSDHITLSNFVQIRTIPRVMDIWDPRHKATTHCIRALSCAVFFADEVIFKARKWPGLEDELNEARETIYTAVVAVYGERGELPFFGHAYGRDLTSCQRFVIVQYILSRWEAFNCYAVIEDLTRSYVNALPSDDDTDQVAQDLIRTIVDTANSLLREVGFIGTLAETLLFLPLPQLPCYKETSHLAKKEGVRILRLAKTGVGLSDTVPVDVSVTERHEYEISRYLDTLYSGDPCYNGAVRLCRLLGSSIPIALYYNTISGNAFEPYFAGRRYIAYLGALFFGRVHQTPFGDGKKTQR

SEQ ID NO: 716 - protein, 103 aa, Vaccinia virus
MIILKDGYKEFADCMYYFLHYYIGYGRYTYSATNGSCDKGEYLDKRHNQCCNRCPPGEFAKVRCNGNDNTKCERCPPHTYTTIPIILMDVINVENAQQDHLIR

SEQ ID NO: 717 - protein, 640 aa, Human cytomegalovirus
MAQGSRAPSGPPLPVLPVDDWLNFRVDLFGDEHRRLLLEMLTQGCSNFVGLLNFGVPSPVYALEALVDFQVRNAFMKVKPVAQEIIRICILANHYRNSRDVLRDLRTQLDVLYSDPLKTRLLRGLIRLCRAAQTGVKPEDISVHLGADDVTFGVLKRALVRLHRVRDALGLRASPEAEARYPRLTTYNLLFHPPPFTTVEAVDLCAENLSDVTQRRNRPLRCLTSIKRPGSRTLEDALNDMYLLLTLRHLQLRHALELQMMQDWVVERCNRLCDALYFCYTQAPETRQTFVTLVRGLELARQHSSPAFQPMLYNLLQLLTQLHEANVYLCPGYLHFSAYKLLKKIQSVSDARERGEFGDEDEEQENDGEPREAQLDLEADPTAREGELFFFSKNLYGNGEVFRVPEQPSRYLRRRMFVERPETLQIFYNFHEGKITTETYHLQRIYSMMIEGASRQTGLTPKRFMELLDRAPLGQESEPEITEHRDLFADVFRRPVTDAASSSSASSSSSSASPNSVSLPSARSSSTRTTTPASTYTSAGTSSTTGLLLSSSLSGSHGISSADLEQPPRQRRRMVSVTLFSPYSVAYSHHRRHRRRRSPPPAPRGPAHTRFQGPDSMPSTSYGSDVEDPRDDLAENLRHL

SEQ ID NO: 718 - protein, 730 aa, Human herpesvirus
MQGLAFLAALACWRCISLTCGATGALPTTATTITRSATQLINGRTNLSIELEFNGTSFFLNWQNLLNVITEPALTELWTSAEVAEDLRVTLKKRQSLFFPNKTVVISGDGHRYTCEVPTSSQTYNITKGFNYSALPGHLGGFGINARLVLGDIFASKWSLFARDTPEYRVFYPMNVMAVKFSISIGNNESGVALYGVVSEDFVVVTLHNRSKEANETASHLLFGLPDSLPSLKGHATYDELTFARNAKYALVAILPKDSYQTLLTENYTRIFLNMTESTPLEFTRTIQTRIVSIEARRACAAQEAAPDIFLVLFQMLVAHFLVARGIAEHRFVEVDCVCRQYAELYFLRRISRLCMPTFTTVGYNHTTLGAVAATQIARVSATKLASLPRSSQETVLAMVQLGARDGAVPSSILEGIAMVVEHMYTAYTYVYTLGDTERKLMLDIHTVLTDSCPPKDSGVSEKLLRTYLMFTSMCTNIELGEMIARFSKPDSLNIYRAFSPCFLGLRYDLHPAKLRAEAPQSSALTRTAVARGTSGFAELLHALHLDSLNLIPAINCSKITADKIIATVPLPHVTYIISSEALSNAVVYEVSEIFLKSAMFISAIKPDCSGFNFSQIDRHIPIVYNISTPRRGCPLCDSVIMSYDESDGLQSLMYVTNERVQTNLFLDKSPFFDNNNLHIHYLWLRDNGTVVEIRGMYRRRAASALFLILSFIGFSGVIYFLYRLFSILY

SEQ ID NO: 719 - protein, 363 aa, Human herpesvirus
MELQRIFPLYTATGAARKLTPEAVQRLCDALTLDMGLWKSILTDPRVKIMRSTAFITLRIAPFIPLQTDTTNIAVVVATIYITRPRQMNLPPKTFHVIVNFNYEVSYAMTATLRIYPVENIDHVFGATFKNPIAYPLPTSIPDPRADPTPADLTPTPNLSNYLQPPRLPKNPYACKVISPGVWWSDERRRLYVLAMEPNLIGLCPAGWHARILGSVLNRLLSHADGCDECNHRVHVGALYALPHVTNHAEGCVCWAPCMWRKAGQRELKVEVDIGATQVLFVDVTTCIRITSTKNPRITANLGDVIAGTNASGLSVPVNSSGWQLYMFGETLSRAIINGCGLLQRICFPETQRLSGEPEPTTT

SEQ ID NO: 720 - protein, 770 aa, Torque teno virus
MAYGWWRRRRRRWRRWRRRPWRRRWRTRRRRPARRRGRRRNVRRRRRGGRWRRRYRRWKRKGRRRKKAKIIIRQWQPNYRRRCNIVGYIPVLICGENTVSRNYATHSDDTNYPGPFGGGMTTDKFTLRILYDEYKRFMNYWTASNEDLDLCRYLGVNLYFFRHPDVDFIIKINTMPPFLDTELTAPSIHPGMLALDKRARWIPSLKSRPGKKHYIKIRVGAPRMFTDKWYPQTDLCDMVLLTVYATAADMQYPFGSPLTDSVVVNFQVLQSMYDKTISILPDEKSQREILLNKIASYIPFYNTTQTIAQLKPFIDAGNVTSGATATTWASYINTTKFTTATTTTYAYPGTNRPPVTMLTCNDSWYRGTVYNTQIQQLPIKAAKLYLEATKTLLGNTFTNEDYTLEYHGGLYSSIWLSPGRSYFETTGAYTDIKYNPFTDRGEGNMLWIDWLSKKNMNYDKVQSKCLISDLPLWAAAYGYVEFCAKSTGDQNIHMNARLLIRSPFTDPQLLVHTDPTKGFVPYSLNFGNGKMPGGSSNVPIRMRAKWYPTLFHQQEVLEALAQSGPFAYHSDIKKVSLGMKYRFKWIWGGNPVRQQVVRNPCKETHSSGNRVPRSLQIVDPKYNSPELTFHTWDFRRGLFGPKAIQRMQQQPTTTDIFSAGRKRPRRDTEVYHSSQEGEQKESLLFPPVKLLRRVPPWEDSQQEESGSQSSEEETQTVSQQLKQQLQQQRILGVKLRLLFNQVQKIQQNQDINPTLLPRGGDLASLFQIAP

SEQ ID NO: 721 - protein, 551 aa, Vaccinia virus
MNNTIINSLIGGDDSIKRSNVFAVDSQIPTLYMPQYISLSGVMTNDGPDNQAIASFEIRDQYITALNHLVLSLELPEVKGMGRFGYVPYVGYKCINHVSISSCNGVIWEIEGEELYNNCINNTIALKHSGYSSELNDISIGLTPNDTIKEPSTVYVYIKTPFDVEDTFSSLKLSDSKITVTVTFNPVSDIVIRDSSFDFETFNKEFVYVPELSFIGYMVKNVQIKPSFIEKPRRVIGQINQPTATVTEVHAATSLSVYTKPYYGNTDNKFISYPGYSQDEKDYIDAYVSRLLDDLVIVSDGPPTGYPESAEIVEVPEDGIVSIQDADVYVKIDNVPDNMSVYLHTNLLMFGTRKNSFIYNISKKFSAITGTYSDATKRTIFAHISHSINIIDTSIPVSLWTSQRNVYNGDNRSAESKAKDLFINDPFIKGIDFKNKTDIISRLEVRFGNDVLYSENGPISRIYNELLTKSNNGTRTLTFNFTPKIFFRPTTITANVSRGKDKLSVRVVYSTMDVNHPIYYVQKQLVVVCNDLYKVSYDQGVSITKIMGDNN

SEQ ID NO: 722 - protein, 91 aa, Vaccinia virus
MYNSSIHTPEYDVIIHVIEHLKHHKQCVQTVTSGMVFTSPVSSSICTKSDDGRNLSDGFLLIRYITTDDFCTIFDIIPRHIFYQLANVDEH

SEQ ID NO: 723 - protein, 452 aa, Human herpesvirus
MASASIPTDPDVSTICEDFMNLLPDEPSDDFALEVTDWANDEAIGSTPGEDSTTSRTVYVERTADTAYNPRYSKRRHGRRESYHHNRPKTLVVVLPDSNHHGGRDVETGYARIERGHRRSSRSYNTQSSRKHRDRSLSNRRRRPTTPPAMTTGERNDQTHDESYRLRFSKRDARRERIRKEYDIPVDRITGRAIEVVSTAGASVTIDSVRHLDETIEKLVVRYATIQEGDSWASGGCFPGIKQNTSWPELMLYGHELYRTFESYKMDSRIARALRERVIRGESLIEALESADELLTWIKMLAAKNLPIYTNNPIVATSKSLLENLKLKLGPFVRCLLLNRDNDLGSRTLPELLRQQRFSDITCITTYMFVMIARIANIVVRGSKFVEYDDISCNVQVLQEYTPGSCLAGVLEALITHQRECGRVECTLSTWAGHLSDARPYGKYFKCSTFNC

SEQ ID NO: 724 - protein, 244 aa, Vaccinia virus
MGNKNIKPSKENRLSILSKDKMDSFKRGSWATSSFREKSRATIQRFSSLRREHIKVDHPDKFLELKRGIYEIIQKSSSIDVDKRTKLMSNIKTMMINPFMIEGLMTSLENLDPDNKMSYSSVMILGEFDIINISDNEAAFEFINSLLKSLLLLNTRQLKLLEYSISNDLLYAHINALEYIIKNTFNVPERQLILRGQYLTPIFSDLLKYAGLTIKSNILMWNKQFIKPVSDLYTSIRLLYCVTV

SEQ ID NO: 725 - protein, 295 aa, Human cytomegalovirus
MMARDEENPAVPRVRTGKFSFTCANHLILQISEKMSRGQPLSSLRLEELKIVRLICVLLFHRGLETLLLRETMNNLGVSDHAVLSRKTPQPYWPHLYRELRQAFPGLDFEAAVFDETRAARLSQRLCHPRLSGGLLTRFVQRHTGLPVVFPEDLARNGNILFSLGTLYGHRLFRLAAFFTRHWGAEAYEPLIRIICQKMWYFYLIGTGKMRITPDAFDIQRSRHETGIFTFIMEDYRTFAGTLSRHPHRPHPQQQQHHHPGPPHPPLSHPASSCLSPEAVLAARALHMPTLANDV

SEQ ID NO: 726 - protein, 568 aa, Influenza A virus
MEKIVLLLAIVSLVKSDQICIGYHANNSTEQVDTIMEKNVTVTHAQDILEKTHNGKLCDLNGVKPLILRDCSVAGWLLGNPMCDEFINVPEWSYIVEKASPANDLCYPGDFNDYEELKHLLSRTNHFEKIQIIPKSSWSNHDASSGVSSACPYHGRSSFFRNVVWLIKKNSAYPTIKRSYNNTNQEDLLVLWGIHHPNDAAEQTKLYQNPTTYISVGTSTLNQRLVPEIATRPKVNGQSGRMEFFWTILKPNDAINFESNGNFIAPEYAYKIVKKGDSAIMKSELEYGNCNTKCQTPMGAINSSMPFHNIHPLTIGECPKYVKSNRLVLATGLRNTPQRERRRKKRGLFGAIAGFIEGGWQGMVDGWYGYHHSNEQGSGYAADKESTQKAIDGVTNKVNSIIDKMNTQFEAVGREFNNLERRIENLNKQMEDGFLDVWTYNAELLVLMENERTLDFHDSNVKNLYDKVRLQLRDNAKELGNGCFEFYHKCDNECMESVKNGTYDYPQYSEEARLNREEISGVKLESMGTYQILSIYSTVASSLALAIMVAGLSLWMCSNGSLQCRICI

SEQ ID NO: 727 - protein, 260 aa, Human adenovirus
MEDINFSSLAPRHGTRPYMGTWNEIGTSQLNGGAFNWNSIWSGLKNFGSTIKTYGSKAWNSQTGQMLRDKLKDQNFQQKVVDGLASGINGVVDIANQAVQKQIANRLEPRPDEVMVEEKLPPLETVPGSVPSKGEKRPRPDAEETLVTHTIEPPSYEEAVKQGAALAPTTYPMTKPILPMATRVYGKNENAPMTLEIPPLPEPTVAEPVVTAPIVSTVSRPEVRPVAVASSRNPRSTNWQSTLNSIVGLGVKSLKRRRCY

SEQ ID NO: 728 - protein, 662 aa, Torque teno mini virus
MPPFYYRRRWYSNPWRRKRLRFRRRRLRRPIRKRFRRRRWVRRRRFFRFKRKLRKIRIDQWQPETIRKCHVKGNLCLLTCGRGNINHNYILTSESYVPTSEPGGGSWSILQMTTRVLYDEYKAARNWWTKSNSLLPLTKYIRCKLKFYRSDQTDYIVTIQRTGPFEVTLESYLSTQPSRHLMNHKAFIVPKLGRGPNKETYVKKIVRPPALFQSKWYFSQDIYNTPLFILTVSSCSLDQMYAPQDQISTNISLFSLNTNVFQINNWHKQPYTTKAASTLETYLYCYHNGHEPTQELKWKDIILLGNMTNYTDGKKYNTSGTTPLDLFKTENKPYWGNVFTNLNQDQDVIIYYGTKPKQDDNWTSTAPILPITSLYVECRYNPFKDKGTGNKVYLVPTDSGLGSFLTLPTKSELIITDLPLWLITWGWIEWLKKSRPVAHIEEEYQVVIQSKYIHPQLPCYVLIDKYFRHPPEGQHYITELSETDKLHWHPKYSMQTEQLELIAETGPAAPKINNTKQIEAHLNYDFLFKWGGSPAPMETITDPAEQEKFPSPSNQLQGLQIESPGKPKQYYLYTFDEKRSELTMPAAKRLKKDFTTPTFFTDFGTKDIPLKTQEETDQISEDEEIETSLPKEDHLKQQLQRTRQYYREGIRKLLKTKKLFPL

SEQ ID NO: 729 - protein, 168 aa, Vaccinia virus
MKSLNRQTVSRFKKLSVPAAIMMILSTIISGIGTFLHYKEELMPSACANGWIQYDKHCYLDTNIKMSTDNAVYQCRKLRARLPRPDTRHLRVLFSIFYKDYWVSLKKTNDKWLDINNDKDIDISKLTNFKQLNSTTDSEACYIYKSGKLVKTVCKSTQSVLCVKKFYK

SEQ ID NO: 730 - protein, 91 aa, Vaccinia virus
MRRCIHIKERKIHMTNIVDRNVTFILTVVHKYVRYVPHTVANDAHNLVHLAHLIHFIIYFFIIRDVRKKKKKKKKNRTIYFFSNVYARHIK

SEQ ID NO: 731 - protein, 467 aa, Human herpesvirus
MDTILAGGSGTSDASDNTCTICMSTVSDLGKTMPCLHDFCFVCIRAWTSTSVQCPLCRCPVQSILHKIVSDTSYKEYEVHPSDDDGFSEPSFEDSIDILPGDVIDLLPPSPGPSRESIQQPTSRSSREPIQSPNPGPLQSSAREPTAESPSDSQQDSIQPPTRDSSPGVTKTCSTASFLRKVFFKDQPAVRSATPVVYGSIESAQQPRTGGQDYRDRPVSVGINQDPRTMDRLPFRATDRGTEGNARFPCYMQPLLGWLDDQLAELYQPEIVEPTKMLILNYIGIYGRDEAGLKTSLRCLLHDSTGPFVTNMLFLLDRCTDPTRLTMQTWTWKDTAIQLITGPIVRPETTSTGETSRGDERDTRLVNTPQKVRLFSVLPGIKPGSARGAKRRLFHTGRDVKRCLTIDLTSESDSACKGSKTRKVASPQGESNTPSTSGSTSGSLKHLTKKSSAGKAGKGIPNKMKKS

SEQ ID NO: 732 - protein, 244 aa, Variola virus
MGNKNIKPSKENRLSILYKDRMDSFKRGSWATSSFREKSHATIQRFLSLRREHVKVDHPDKFLELKREIYAIIQKSSSIDVDKRTKLMSNIKTMMINPFMIEGLMTSLESLDPDNKMSYSSVMILGEFDIINISDNKAAFEFINSLLKSLLLLNTSQLKLLEYSISNDLLYTHINALEYIIKNTFNVPERQLILRCQYLTPIFSDLLKYAGLTIKSNILMWNKKFIKPVSDLYTSMQLLHCVTV

SEQ ID NO: 733 - protein, 102 aa, Human cytomegalovirus
MKRMIRSHGRKTECQMTGAGERRGSAVGALICGSGTRRGSGANERRDSDVGPIAHSSGTRRGSANETSACTRTDHQKADIGLWFMFLVFGLCSWLAMRYRAQ

SEQ ID NO: 734 - protein, 873 aa, Human cytomegalovirus
MTAQPPLHHRHHPYTLFGTSCHLSWYGLLEASVPIVQCLFLDLGGGRAEPRLHTFVVRGDRLPPAEVRAVHRASYAALASAVTTDADERRRGLEQRSAVLARVLLEGSALIRVLARTFTPVQIQTDASGVEILEAAPALGVETAALSNALSLFHVAKLVVIGSYPEVHEPRVVTHTAERVSEEYGTHAHKKLRRGYYAYDLAMSFRVGTHKYVLERDDEAVLARLFEVREVCFLRTCLRLVTPVGFVAVAVTDEQCCLLLQSAWTHLYDVLFRGFAGQPPLRDYLGPDLFETGAARSFFFPGFPPVPVYAVHGLHTLMRETALDAAAEVLSWCGLPDIVGSAGKLEVEPCALSLGVPEDEWQVFGTEAGGGAVRLNATAFRERPAGGDRRWLLPPLPRDDGDGENNVVEVSSSTGGAHPPSDDATFTVHVRDATLHRVLIVDLVERVLAKCVRARDFNPYVRYSHRLHTYAVCEKFIENLRFRSRRAFWQIQSLLGYISEHVTSACASAGLLWVLSRGHREFYVYDGYSGHGPVSAEVCVRTVVDCYWRKLFGGDDPGPTCRVQESAPGVLLVWGDERLVGPFNFFYGNGGAGGSPLHGVVGGFAAGHCGGACCAGCVVTHRHSSGGGGSGVGDADHASGGGLDAAAGSGHNGGSDRVSPSTPPAALGGCCCAAGGDWLSAVGHVLGRLPALLRERVSVSELEAVYREILFRFVARRNDVDFWLLRFQPGENEVRPHAGVIDCAPFHGVWAEQGQIIVQSRDTALAADIGYGVYVDKAFAMLTACVEVWARELLSSSTASTTACSSSSVLSSALPSVTSSSSGTATVSPPSCSSSSATWLEERDEWVRSLAVDAQHAAKRVASEGLRFFRLNA

SEQ ID NO: 735 - protein, 676 aa, Human herpesvirus
MEAHLANETKHALWHNDHTKGLLHVVIPNAGLIAAGIDPALLILKKPGQRFKVEVQTRYHATGQCEPWCQVFAAYIPDNALTNLLIPKTEPFVSHVFSATHNSGGLILSLPVYLSPGLFFDAFNVVAIRINTGNRKHRDICIMYAELIPNGTRYFADGQRVLLLCKQLIAYIRCTPCLASSIKIYAEHMVAAMGESHTSNGDNIGPVSSIIDLDRQLTSGGIDDSPAETRIQENNRDVLELIKRAVNIVNSRHPVRPSSSRVASGLLQSAKGHGAQTSNTDPINNGSFDGVLEPPGQGRFTGKKNNSSASIPPLQDVLLFTPASTEPQSLMEWFDICYAQLVSGDTPADFWKRRPLSIVPRHYAESPSPLIVVSYNGSSAWGGRITGSPILYHSAQAIIDAACINARVDNPQSLHVTARQELVARLPFLANVLNNQTPLPAFKPGAEMFLNQVFKQACVTSLTQGLITELQTNPTLQQLMEYDIADSSQTVIDEIVARTPDLIQTIVSVLTEMSMDAFYNSSLMYAVLAYLSSVYTRPQGGGYIPYLHASFPCWLGNRSIYLFDYYNSGGEILKLSKVPVPVALEKVGIGNSTQLRGKFIRSADIVDIGICSKYLPGQCYAYICLGFNQQLQSILVLPGGFAACFCITDTLQAALPASLIGPILDRFCFSIPNPHK

SEQ ID NO: 736 - protein, 310 aa, Epstein-Barr virus; identical to SEQ ID NO: 296

SEQ ID NO: 737 - protein, 315 aa, Vaccinia virus
MTRLPILLLLISLVYATPFPQTSKKIGDDATLSCNRNNTNDYVVMSAWYKEPNSIILLAAKSDVLYFDNYTKDKISYDSPYDDLVTTITIKSLTARDAGTYVCAFFMTSPTNDTDKVDYEEYSTELIVNTDSESTIDIILSGSTHSPETSSEKPDYIDNSNCSSVFEIATPEPITDNVEDHTDTVTYTSDSINTVSASSGESTTDETPEPITDKEEDHTVTDTVSYTTVSTSSGIVTTKSTTDDADLYDTYNDNDTVPPTTVGGSTTSISNYKTKDFVEIFGITALIILSAVAIFCITYYIYNKRSRKYKTENKV

SEQ ID NO: 738 - protein, 70 aa, Vaccinia virus
MLDPSTGWVLMSLSFSSSLHLMSIDTSQSLIIARASSRVIAGESLPCPGDTLDNLAFTVFPSADSEMDLI

SEQ ID NO: 739 - protein, 1310 aa, Human herpesvirus
MDTPPMQRSTPQRAGSPDTLELMDLLDAAAAAAEHRARVVTSSQPDDLLFGENGVMVGREHEIVSIPSVSGLQPEPRTEDVGEELTQDDYVCEDGQDLMGSPVIPLAEVFHTRFSEAGAREPTGADRSLETVSLGTKLARSPKPPMNDGETGRGTTPPFPQAFSPVSPASPVGDAAGNDQREDQRSIPRQTTRGNSPGLPSVVHRDRQTQSISGKKPGDEQAGHAHASGDGVVLQKTQRPAQGKSPKKKTLKVKVPLPARKPGGPVPGPVEQLYHVLSDSVPAKGAKADLPFETDDTRPRKHDARGITPRVPGRSSGGKPRAFLALPGRSHAPDPIEDDSPVEKKPKSREFVSSSSSSSSWGSSSEDEDDEPRRVSVGSETTGSRSGREHAPSPSNSDDSDSNDGGSTKQNIQPGYRSISGPDPRIRKTKRLAGEPGRQRQKSFSLPRSRTPIIPPVSGPLMMPDGSPWPGSAPLPSNRVRFGPSGETREGHWEDEAVRAARARYEASTEPVPLYVPELGDPARQYRALINLIYCPDRDPIAWLQNPKLTGVNSALNQFYQKLLPPGRAGTAVTGSVASPVPHVGEAMATGEALWALPHAAAAVAMSRRYDRAQKHFILQSLRRAFASMAYPEATGSSPAARISRGHPSPTTPATQAPDPQPSAAARSLSVCPPDDRLRTPRKRKSQPVESRSLLDKIRETPVADARVADDHVVSKAKRRVSEPVTITSGPVVDPPAVITMPLDGPAPNGGFRRIPRGALHTPVPSDQARKAYCTPETIARLVDDPLFPTAWRPALSFDPGALAEIAARRPGGGDRRFGPPSGVEALRRRCAWMRQIPDPEDVRLLIIYDPLPGEDINGPLESTLATDPGPSWSPSRGGLSVVLAALSNRLCLPSTHAWAGNWTGPPDVSALNARGVLLLSTRDLAFAGAVEYLGSRLASARRRLLVLDAVALERWPRDGPALSQYHVYVRAPARPDAQAVVRWPDSAVTEGLARAVFASSRTFGPASFARIETAFANLYPGEQPLCLCRGGNVAYTVCTRAGPKTRVPLSPREYRQYVLPGFDGCKDLARQSRGLGLGAADFVDEAAHSHRAANRWGLGAALRPVFLPEGRRPGAAGPEAGDVPTWARVFCRHALLEPDPAAEPLVLPPVAGRSVALYASADEARNALPPIPRVMWPPGFGAAETVLEGSDGTRFVFGHHGGSERPSETQAGRQRRTADDREHALELDDWEVGCEDAWDSEEGGGDDGDAPGSSFGVSIVSVAPGVLRDRRVGLRPAVKVELLSSSSSSEDEDDVWGGRGGRSPPQSRG

SEQ ID NO: 740 - protein, 162 aa, Vaccinia virus
MDEAYYSGNLESVLGYVSDMHTELASISQLVIAKIETIDNDILNKDIVNFIMCRSNLDNPFISFLDTVYTIIDQENYQTELINSLDDNEIIDCIVNKFMSFYKDNLENIVDAIITLKYIMNNPDFKTTYAEVLGSRIADIDIKQVIRKNILQLSNDIRERYL

SEQ ID NO: 741 - protein, 258 aa, Human herpesvirus
MTQIGQYIKLNDAVPNLILHITTKLLRNENLTSFKQEELLLIQHVCTSMLSHGIKILLLRESLYNSGIGDIVILNRKISNNYWFRLFSILKQHSDAELLRHMFNESHSAYISKKLHYSGNVSHIINFLFMDEFGLSLKIPEEIICEGNIVFSVGAIYNHRLLKICRFFNRFWGDQEREPAVRLICKHLWFAYLIMFGKFEISTLAYNQQRAEHKAGLFSFLQNDFKVFCGMSENPQLLDSSAIFDLTGISAEDLFSYE

SEQ ID NO: 742 - protein, 659 aa, Human herpesvirus
MQMRGCVCHLGVYCVHNDWKNKQYRVPIYQCLFFNAETHSLHTFLVIGNEISENLLDKISISKEKIFMWDLNEQIMSITQKTESICELMFGNKQIIQKLSRTFIFLTIILNSNMYEIIDVCIDSNAVLYMPDLRPMIIRCVGNYSKISSELLSDSDCTQATKKMRFDYHVTNFCFSLNVNGKKVLFSSTESSESILEKLLEFFTIQTYKLAEEQFLMVTPKNFFTVLFDEDMCLLLLQTVVSFLYDNLFRNKLVVKQVHDYIGPDLWPQGHERAVYFVGFPNMWFLSIYDLDNKIPCIKNICNRILLYCGLPDSLGPDGCQSVPSTQCVDEFEDLPNLGALQYLKYNSLVVTMETVENSENVYYFFGEQDLFIVKLVDIIQSLLELYVPKSFLPDFSDAYIKSEILLKFISRLHKKSNNIFCKIVKKITEFLRCFLNACRLMDLNWMFIRNMHIVYFIGPKKDPSVVLPLLKTSVESCWKKILNSSRTPVVNINYIPGYNFLHSSCSFLTSGDINSEDSHWTITASKCLYNCLGASQITVDFKNIYTNFQQMVSVFLSHRYENKYWIEYFEPNNYFLETHEGLLDCNRYTAVWTTENKLIRQSVGYPLTDKIDFIHYIQVVIEIFKKWLLTKYSQQEYAETVRLGSKIISDHLHLFNVN

SEQ ID NO: 743 - protein, 340 aa, Human herpesvirus
MQALGIKTEHFIIMCLLSGHAVFTLWYTARVKFEHECVYATTVINGGPVVWGSYNNSLIYVTFVNHSTFLDGLSGYDYSCRENLLSGDTMVKTAISTPLHDKIRIVLGTRNCHAYFWCVQLKMIFFAWFVYGMYLQFRRIRRMFGPFRSSCELISPTSYSLNYVTRVISNILLGYPYTKLARLLCDVSMRRDGMSKVFNADPISFLYMHKGVTLLMLLEVIAHISSGCIVLLTLGVAYTPCALLYPTYIRILAWVVVCTLAIVELISYVRPKPTKDNHLNHINTGGIRGICTTCCATVMSGLAIKCFYIVIFAIAVVIFMHYEQRVQVSLFGESENSQKH

SEQ ID NO: 744 - protein, 245 aa, Epstein-Barr virus
MMDPNSTSEDVKFTPDPYQVPFVQAFDQATRVYQDLGGPSQAPLPCVLWPVLPEPLPQGQLTAYHVSAAPTGSWFPAPQPAPENAYQAYAAPQLFPVSDITQNQLTNQAGGEAPQPGDNSTVQPAAAVVLACPGANQEQQLADIGAPQPAPAAAPARRTRKPLQPESLEECDSELEIKRYKNRVASRKCRAKFKHLLQHYREVASAKSSENDRLRLLLKQMCPSLDVDSIIPRTPDVLHEDLLNF

SEQ ID NO: 745 - protein, 187 aa, Vaccinia virus
METLTSSSQSLMSSPMSKKDYSSEIICAFDIGAKNPARTVLEVKDNSVRVLDISKLDWSSDWERRIAKDLSQYEYTTVLLERQPRRSPYVKFIYFIKGFLYHTSAAKVICVSPVMSGNSYRDRKKRSVEAFLDWMDTFGLRNSVPDRRKLDDVADSFNLAMRYVLDKWNTNYTPYNRCKSRNYIKKM

SEQ ID NO: 746 - protein, 74 aa, Vaccinia virus
MNFSYSRRWLVYLTYYSPRFLYKRWFNLYILNHISNKAQFRNINKFFVERFKVERRVTNNDIGYWIEGYRYGNF

SEQ ID NO: 747 - protein, 410 aa, Human herpesvirus
MECNLGTEHPSTDTWNRSKTEQAVVDAFDESLFGDVASDIGFETSLYSHAVKTAPSPPWVASPKILYQQLIRDLDFSEGPRLLSCLETWNEDLFSCFPINEDLYSDMMVLSPDPDDVISTVSTKDHVEMFNLTTRGSVRLPSPPKQPTGLPAYVQEVQDSFTVELRAREEAYTKLLVTYCKSIIRYLQGTAKRTTIGLNIQNPDQKAYTQLRQSILLRYYREVASLARLLYLHLYLTVTREFSWRLYASQSAHPDVFAALKFTWTERRQFTCAFHPVLCNHGIVLLEGKPLTASALREINYRRRELGLPLVRCGLVEENKSPLVQQPSFSVHLPRSVGFLTHHIKRKLDAYAVKHPQEPRHVRADHPYAKVVENRNYGSSIEAMILAPPSPSEILPGDPPRPPTCGFLTR

SEQ ID NO: 748 - protein, 61 aa, Variola virus
MTMNKPKTNYAGYACCVICGLIVGIIFTATLLKAVERKLIHTPLIDKTIKDAYIREDCPTD

SEQ ID NO: 749 - protein, 252 aa, Human herpesvirus
MSLTGLPDIRKKIGQFHHLRIYKQILSLQGNFARLNYFLGDVFPANLRSASVSVFFEVRLGPRIPDCIVLLKSVDAKDEFAFHCYFFEFKTTLGKSTMQSVHHNCIHQAQYLQGLRQLQQSISFLDQYLIADEVSWNVVPVICFFRQWGLKLDFFKKFSGKTKRLSFSFIRDLFARSQDGAVQSLLSIPNYTNFRRACQKHTDLYRKRCRKAPKSVLTKTSGENRSRASRQVAKNAPKNRIRRTAKKDAKRQ

SEQ ID NO: 750 - protein, 669 aa, Human herpesvirus
MATSEETAAGYVIGVYFHSVHVHCRIIVWQVNFLPLDPNDGETECYFVVDTLTKEAMERMPEIQECVPSITEHARDLAIWELALRLQNQTIVKAVRTASLPVVLIMTVGRIVNDVIPCPNVRTPRPLACAYLHCEATVTFEVPLTGPAASTGTWHSSIYRECAISAIEICLKTSRGIYSCQSNEAPEAKREKRGLDISDVFVCLTYDIPIAGRVLSLLVPHAPAFHVLWINEDSKWNGAAVEFFRALHHKLFSERNGIPPLWLYVFPGAVEEGTAFAPLLPAFPCIPLRYGSPTSLDRASVQWDLFEPHILTHFDGIKRTSLADTVFGYDSLAISRECEDQYVWPTPVTDININLCTDSDTMAIVREPSGLVAVNLEALLRTDSVLSRVSSIVSLDTLLDLSTPECRRSVELRYNSLLSTVLSWSTSRGHKWAAIVKWKLFFLVQALEPEQWSPEFKDLKRACQMAGFTLKGGTSGDLVFSSHANLLFSTSMGYFLHAGSPRSTAGTGGEPNPRHITGPDTEGNGEHRNSPNLCGFVTWLQSLTTCIERALNMPPDTSWLQLIEEVIPLYFHRRRQTSFWLIPLSHCEGIPVCPPLPFDCLAPRLFIVTKSGPMCYRAGFSLPVDVNYLFYLEQTLKAVRQVSPQEHNPQDAKEMTLQLEAWTRLLSLF

SEQ ID NO: 751 - protein, 71 aa, Human herpesvirus
MDVRERNVFGNASVATPGEHQKFVRELILSGHNNVVLQTYTGKWSDCRKHGKSVMYNTGEARHPTCKAHQR

SEQ ID NO: 752 - protein, 122 aa, Vaccinia virus
MKSVLYSYILFLSCIIINGRDIAPHAPSDGKCKDNEYKRHNLCPGTYASRLCDSKTNTQCTPCGSGTFTSRNNHLPACLSCNGRRDRVTLLTIESVNALPDIIVFSKDHPDARHVFPKQNVE

SEQ ID NO: 753 - protein, 382 aa, Vaccinia virus
MDNLFTFLHEIEDRYARTIFNFHLISCDEIGDIYGLMKERISSEDMFDNIVYNKDIHHAIKKLVYCDIQLTKHIINQNTYPVFNDSSQVKCCHYFDINSDNSNISSRTVEIFEREKSSLVSYIKTTNKKRKVNYGEIKKTVHGGTNANYFSGKKSDEYLSTTVRSNINQPWIKTISKRMRVDIINHSIVTRGKSSILQTIEIIFTNRTCVKIFKDSTMHIILSKDKDEKGCIHMIDKLFYVYYNLFLLFEDIIQNEYFKEVANVVNHVLTATALDEKLFLIKKMAEHDVYGVSNFKIGMFNLTFIKSLDHTVFPSLLDEDSKIKFFKGKKLNIVALRSLEDCINYVTKSENMIEMMKERSTILNSIDIETESVDRLKELLLK

SEQ ID NO: 754 - protein, 76 aa, Vaccinia virus
MSEYFISRTSIWTVFMLPIMYGPIKSMIEISRSSYNVSVIVNTPIGVITNAASMAAYVNDLLLIHFLLSLVEFFNT

SEQ ID NO: 755 - protein, 770 aa, Human herpesvirus
MELDINRTLLVLLGQVYTYIFQVELLRRCDPRVACRFLYRLAANCLTVRYLLKLFLRGFNTQLKFGNTPTVCALHWALCYVKGEGERLFELLQHFKTRFVYGETKDSNCIKDYFVSAFNLKTCQYHHELSLTTYGGYVSSEIQFLHDIENFLKQLNYCYIITSSREALNTLETVTRFMTDTIGSGLIPPVELFDPAHPCAICFEELCITANQGETLHRRLLGCICDHVTKQVRVNVDVDDIIRCLPYIPDVPDIKRQSAVEALRTLQTKTVVNPMGAKNDTFDQTYEIASTMLDSYNVFKPAPRCMYAISELKFWLTSNSTEGPQRTLDVFVDNLDVLNEHEKHAELTAVTVELALFGKTPIHFDRAFSEELGSLDAIDSILVGNRSSSPDSQIEALIKACYAHHLSSPLMRHISNPSHDNEAALRQLLERVGCEDDLTKEASDSATASECDLNDDSSITFAVHGWENLLSKAKIDAAERKRVYLEHLSKRSLTSLGRCIREQRQELEKTLRVNVYGEALLQTFVSMQNGFGARNVFLAKVSQAGCIIDNRIQEAAFDAHRFIRNTLVRHTVDAAMLPALTHKFFELVNGPLFNHDEHRFAQPPNTALFFTVENVGLFPHLKEELAKFMGGVVGSNWLLSPFRGFYCFSGVEGVTFAQRLAWKYIRELVFATTLFTSVFHCGEVRLCRVDRLGKDPRGCTSQPKGIGSSHGPLDGIYLTYEETCPLVAIIQSGETGIDQNTVVIYDSDVFSLLYTLMQRLAPDSTDPAFS

SEQ ID NO: 756 - protein, 77 aa, Vaccinia virus; identical to SEQ ID NO: 436

SEQ ID NO: 757 - protein, 201 aa, Human cytomegalovirus
MCDASGACDMRHVQNAFTEEIQLHSLYACTRCFRTHLCDLGSGCALVSTLEGSVCVKTGLVYEALYPVARSHLLEPIEEAALDDVNIISAVLSGVYSYLMTHAGRYADVIQEVVERDRLKKQVEDSIYFTFNKVFRSMHNVNRISVPVISQLFIQLIIGIYSKQTKYDACVIKVSRKKREDALLKQMRSEYGNAPVFGSGV

SEQ ID NO: 758 - protein, 771 aa, Varicella-zoster virus
MDATQITLVRESGHICAASIYTSWTQSGQLTQNGLSVLYYLLCKNSCGKYVPKFAEITVQQEDLCRYSRHGGSVSAATFASICRAASSAALDAWPLEPLGNADTWRCLHGTALATLRRVLGFKSFYSPVTFETDTNTGLLLKTIPDEHALNNDNTPSTGVLRANFPVAIDVSAVSACNAHTQGTSLAYARLTALKSNGDTQQQTPLDVEVITPKAYIRRKYKSTFSPPIEREGQTSDLFNLEERRLVLSGNRAIVVRVLLPCYFDCLTTDSTVTSSLSILATYRLWYAAAFGKPGVVRPIFAYLGPELNPKGEDRDYFCTVGFPGWTTLRTQTPAVESIRTATEMYMETDGLWPVTGIQAFHYLAPWGQHPPLPPRVQDLIGQIPQDTGHADATVNWDAGRISTVFKQPVQLQDRWMAKFDFSAFFPTIYCAMFPMHFRLGKIVLARMRRGMGCLKPALVSFFGGLRHILPSIYKAIIFIANEISLCVEQTALEQGFAICTYIKDGFWGIFTDLHTRNVCSDQARCSALNLAATCERAVTGLLRIQLGLNFTPAMEPVLRVEGVYTHAFTWCTTGSWLWNLQTNTPPDLVGVPWRSQAARDLKERLSGLLCTATKIRERIQENCIWDHVLYDIWAGQVVEAARKTYVDFFEHVFDRRYTPVYWSLQEQNSETKAIPASYLTYGHMQDKDYKPRQIIMVRNPNPHGPPTVVYWELLPSCACIPPIDCAAHLKPLIHTFVTIINHLLDAHNDFSSPSLKFTDDPLASYNFLFL

SEQ ID NO: 759 - protein, 176 aa, Epstein-Barr virus
MARRLPKPTLQGRLEADFPDSPLLPKFQELNQNNLPNDVFREAQRSYLVFLTSQFCYEEYVQRTFGVPRRQRAIDKRQRASVAGAGAHAHLGGSSATPVQQAQAAASAGTGALASSAPSTAVAQSATPSVSSSISSLRAATSGATAAASAAAAVDTGSGGGGQPQDTAPRGARKKQ

SEQ ID NO: 760 - protein, 244 aa, Vaccinia virus
MHVPASLQQSSSSSSSCTEEENKHHMGIDVIIKVTKQDQTPTNDKICQSVTEITESESDPDPEVESEDDSTSVEDVDPPTTYYSIIGGGLRMNFGFTKCPQIKSISESADGNTVNARLSSVSPGQGKDSPAITREEALAMIKDCEVSIDIRCSEEEKDSDIKTHPVLGSNISHKKVSYEDIIGSTIVDTKCVKNLEFSVRIGDMCKESSELEVKDGFKYVDGSASEGATDDTSLIDSTKLKACV

SEQ ID NO: 761 - protein, 2124 aa, Cosavirus A
MGANNSKESVSSNGNEGTIVNNFYSNQYYASIDASAQGVGTSTTPENGNVSGFLGLAGSAFNALSLLASPRTETGMMMEDRVLSRTAGNTSVNSQAAEGVLQAYGTETDSNSPTSCGDDPSKGTHATDRAFVIQLLPWKQTTNSYFAQWVRLTQKLSNNLHGNVMAKNIKSHAFAKMGFEVMLQANTSPFHNGILGLFLVPEFVRKGEITDEWIDLTPTSSLVSNTELYNPQTYANFPFDAKHSFDYSDITPEQFMIFPHQLINPKDTNVATVRVPYINIAPTNDTTVHTVWTAVVMVLVPLNFSSGASPTVSLTLTITPINSVFNGLHHTAQGPIPVRPFHNFQQFSTTVPLRTEPCYGMTVTPPVDYMPLPITDLVELAKVPSFVTVANSDTTSERSFPYFSVSNTEQGRNLFKSSVVLSDLHYQHTLVANLARYFCNYRGSLQFDFIAATTAMTRGKLLISYTPPGAGEPQSIDQAMMGTYAIWDLGLQSTFNFVVPFISASDFRFNTSSVSNALNSDGWITVWLMNPLTYPPSTPPTQQILMLMSAGSDFSYRLPISPGFAEGETSEHPMDNAECGKIDDKDAGMFSGHSVGLPTPHTSTSFFYDRYRFVGIVKSVVNNTPKPVNIYDDTGKVKNLQQVFPTSDTLLPHSLMSLSPCASVCGQPISSFLFAQRANPKKTLKLRSGDEFLYRCCPFSYIKCDLEFTVVPPANSTRDYIVHWYPPGATLDAGEVAVGNTSGSNGFDDNGMNAGSSLFSYNPTFHARAPSKVSAVIPFCLPVSLLPLYFDGFPDYSTTKGMYGCSPSFSFGTIYIESGLQETYSVYIRYKDFKGYAPRPLIRTPHIRLSERARYIMADSVLPRPLTRAERDVARDLLLIAGDIESNPGPAFNPEYTAHGPVTELIQLARKPETVDNVNRLLTTLNTLMAKWNNLKDTVTDAVFLRDMVCLLVKLTSLMYLVHGQGPGAYFAAASILLADGITFFDWYEKIKIFMARKLRVSPPFFPAAQGPDLRDFVTFFNAARGAQWMIDSLKSLITCIKQWLELEEENEAVQLEKMLIDSPRHCKAINDYNRGDSFQRPTNSFEFMDRLVECATKLGKVQIATYFRNFTTADSDTSRPEPVVVVLRGKPGVGKSAAATVMAAAVSKLLVGSQSVYTLSPDTEHMDGYHGQFVTLMDDLGQNPDGEDFRCFCQMVSCAQYRPAMADLKDKGILFTSRLLIATTNLPDFNPVTISDPRALDRRITFDILVTPGSAATKNGKLDLAAALKPDGPGEHPYTSDCPILHTTGLLLKNLRNNQTMNLKDLVDMIVKRIKHKKEVGNMLDSLVAQGPTMIVGYTKDDDGIAIVDCLEEWNKIKDKKKKQLALEMVAQELKDKHEEHKGTIKLLKMFVTGLGVVAAVAGAYATMKYFTKDKPKEEEEEPEEKKEKKTEESKEAAGPYNGPTKKEIKTLKLKAQSPLMDMEKKIAQNVMPFQIFYNGKRYTQSCLAIGKRVILVNKHAFESVEHKFVVDQKEYTLDQVTAISLDCGSGVTDVCAVCLPPGPDFKSIKKHFLPFNTTMFPGTRLTILSNDHYPMSREGSFLRFEDEVPTNVGNMPFVMLYKSTSYFGMCGSVVCSRFVDGGGIIGMHCAGGGGVSVGTRLTARMIESVFDYFYPPVAQGIIENTETGPRVHVPRTSKLKRTNATYPATEKYGPAALSRYDPRLNEGVNLDEVIFSKHTQNTLVEKGSTFRSALDMAAEIYGEKFRGNDFSPLSVEDAILGIPGLDRLDPNTASGLPYTKTRRQMIDFNTGQILDDTLKCRLGQWLAGRPPQEVHYQTFLKDEIRPIEKVKAGKTRIIDVPPLDHVIAFRMLFGRFIAHYHLNFGFKTGSAIGCDPDVAWASFGFELSGFPYLYDFDYSNFDASHSTSIFEILEQKFFSPELGFDPRCSLLLKSLAVSTHCYENKRLQIAGGLPSGTAGTSVLNTVINNIIFHGALYHTYTNFERDDISMLAYGDDIVVASKFELDLVMVKAFMNRIGYKITPADKSDEFRPKCMDDICFLKRRFVKVAGVWAPVMETENLEAMLSWYKPGTLNEKLQSVSRLAHFSGRDVYDHLFKPFIRDGFDVTPWKQLHLEWLNKLSA

SEQ ID NO: 762 - protein, 77 aa, Vaccinia virus
MFANAIHLYFLFVNSQCLDTRLDRATTILESQHIISFTKLTKSNSPESESTLSFSLNNRSMSPYCLIAKSSSVINAE

SEQ ID NO: 763 - protein, 354 aa, Human herpesvirus
MFLIQCLISAVIFYIQVTNALIFKGDHVSLQVNSSLTSILIPMQNDNYTEIKGQLVFIGEQLPTGTNYSGTLELLYADTVAFCFRSVQVIRYDGCPRIRTSAFISCRYKHSWHYGNSTDRISTEPDAGVMLKITKPGINDAGVYVLLVRLDHSRSTDGFILGVNVYTAGSHHNIHGVIYTSPSLQNGYSTRALFQQARLCDLPATPKGSGTSLFQHMLDLRAGKSLEDNPWLHEDVVTTETKSVVKEGIENHVYPTDMSTLPEKSLNDPPENLLIIIPIVASVMILTAMVIVIVISVKRRRIKKHPIYRPNTKTRRGIQNATPESDVMLEAAIAQLATIREESPPHSVVNPFVK

SEQ ID NO: 764 - protein, 61 aa, Variola virus
MTVYAVTGGAEFLGRYIVKLLISADDVQEIRVINVVEDPQPLVSKVKVINYIQCDINDLIR

SEQ ID NO: 765 - protein, 368 aa, Human cytomegalovirus
MMTMWCLTLFVLWMLRVVGMHVLRYGYTGIFDDTSHMTLTVVGIFDGQHFFTYHVNSSDKASSRANGTISWMANVSAAYPTYLDGERAKGDLIFNQTEQNLLELEIALGYRSQSVLTWTHECNTTENGSFVAGYEGFGWDGETLMELKDNLTLWTGPNYEISWLKQNKTYIDGKIKNISEGDTTIQRNYLKGNCTQWSVIYSGFQPPVTHPVVKGGVRNQNDNRAEAFCTSYGFFPGEINITFIHYGDKVPEDSEPQCNPLLPTLDGTFHQGCYVAIFCNQNYTCRVTHGNWTVEIPISVTSPDDSSSGEVPDHPTANKRYNTMTISSVLLALLLCALLFAFLHYFTTLKQYLRNLAFAWRYRKVRSS

SEQ ID NO: 766 - protein, 256 aa, Human herpesvirus
MASKDVEEGVEGPICWICREEVGNEGIHPCACTGELDVVHPQCLSTWLTVSRNTACQMCRVIYRTRTQWRSRLNLWPEMERQEIFELFLLMSVVVAGLVGVALCTWTLLVILTAPAGTFSPGAVLGFLCFFGFYQIFIVFAFGGICRVSGTVRALYAANNTRVTVLPYRRPRRPTANEDNIELTVLVGPAGGTDEEPTDESSEGDVASGDKERDGSSGDEPDGGPNDRAGLRGTARTDLCAPTKKPVRKNHPKNNG

SEQ ID NO: 767 - protein, 591 aa, Epstein-Barr virus
MALFLARHTLSGTGAGGHGRGPAPDVSEVDLTLPALGEREFSRLLDLGLACLDLSYVEMREFVVWGRPPASEAAVASTPGSLFRSHSSAYWLSEVERPGGLVRWARSQTSPSSLTLAPHLGPSLLSLSAFTGGGCGAVAFCNAFFLAYFLVVRSVFPAFSDRIAAWICARSPFCENTRAVARGYRGLVKRFLAFVFERSSYDPPLLRQNSRPVERCFAIKNYVPGLDSQSCVTVPSFSRWAQSHASELDPREIRDRVTPATAPSFVADHASALLASLQKKASDTPCGNPIQWMWYRLLVNSCLRSAHCLLPIPAVSEGGRKTGGGVGEELVGAGGPCLSRDVFVAIVSRNVLSCLLNVPAAGPWAYKCFRSHASRPVSGPDYPPLAVFCMDCGYCLNFGKQTGVGGRLNSFRPTLQFYPRDQKEKHVLTCHASGRVYCSNCGSAAVGFQRLAEPPSARSGWQPRIRAVLPHNAAYELDRGSRLLDAIIPCLGPDRTCMRPVVLRGVTVRQLLYLTLRTEARAVCSICQQRQAPEDARDEPHLFSSCLEVELPPGERCAGCRLYQTRYGTPAAQAHPPGEAGGGFSRQSPAS

SEQ ID NO: 768 - protein, 204 aa, Vaccinia virus; identical to SEQ ID NO: 393

SEQ ID NO: 769 - protein, 284 aa, Vaccinia virus
MSIGFEARIVDKFGKNHIHRHLMSDNPKASTISWMMKLGISPSKPDHDGNTPLHIVCSKTVKNVDIIDLLLPSTDVNKQNKFGDSPLTLLIKTLSPAHLINKLLSTSNVITDQTVNICIFYDRDDVLEIINDKGKQYDFKMAVEVGSIRCVKYLLDNDIICEDAMYYAVLSEYETMVDYLLFNHFSVDSVVNGHTCMSECVRLNNPVILSKLMLHNPTSETMYLTMKAIEKDRLDKSIIIPFIAYFVLMHPDFCKNRRYFTSYKRFVTDYVHEGVSYEVFDDYF

SEQ ID NO: 770 - protein, 72 aa, Vaccinia virus
MFASCFNINGTNFILALCIIFVPTIKLYIQIIMRCVYANGINKRSTPFSHNRNPKIFKVYLNERSCIIVRIW

SEQ ID NO: 771 - protein, 269 aa, Human herpesvirus
MSRRTYVRSERRRGCGDNLLQRIRLVVPSALQCCDGDLPIFDPQRPPARCVFQFNGEDNVSEAFPVEYIMRLMANWAQVDCDPYIKIQNTGVSVLFQGFFFRPTNAPVAEVSIDSNNVILSSTLSTGINLSALESIKRGGGIDRRPLQALMWVNCFVRMPYVQLSFRFMGPEDPSRTIKLMARATDAYMYKETGNNLDEYIRWRPSFRSPPENGSPNTSVQMQSDIKPALPDTQTTRVWKLALPVANVTYALFIVIVLVVVLGAVLFWK

SEQ ID NO: 772 - protein, 203 aa, Variola virus
MSYLRYYNMLDDFSAGAGVLDKDLFTEEQQQSFMPKDGGMMQNDYGGMNDYLGIFKNNDVRTLLGLILFVLALYSPPLISILMIFISSFLLPLTSLVITYCLVTQMYRGGNGNTVGMSIVCIVAAVIIMAINVFTNSQIFNIISYIILFILFFAYVMNIERQDYRRSINVTIPEQYTCNKPYTAGNKVDVDIPTFNSLNTDDY

SEQ ID NO: 773 - protein, 368 aa, Human cytomegalovirus
MMTMWCLTLFVLWMLRVVGMHVLRYGYTGIFDDTSHMTLTVVGIFDGQHFFTYHVNSSDKASSRANGTISWMANVSAAYPTYLDGERAKGDLIFNQTEQNLLELEIALGYRSQSVLTWTHECNTTENGSFVAGYEGFGWDGETLMELKDNLTLWTGPNYEISWLKQNKTYIDGKIKNISEGDTTIQRNYLKGNCTQWSVIYSGFQTPVTHPVVKGGVRNQNDNRAEAFCTSYGFFPGEINITFIHYGNKAPDDSEPQCNPLLPTFDGTFHQGCYVAIFCNQNYTCRVTHGNWTVEIPISVTSPDDSSSGEVPDHPTANKRYNTMTISSVLLALLLCALLFAFLHYFTTLKQYLRNLAFAWRYRKVRSS

SEQ ID NO: 774 - protein, 1318 aa, Epstein-Barr virus
MEERGRETQMPVARYGGPFIMVRLFGQDGEANIQEERLYELLSDPRSALGLDPGPLIAENLLLVALRGTNNDPRPQRQERARELALVGILLGNGEQGEHLGTESALEASGNNYVYAYGPDWMARPSTWSAEIQQFLRLLGATYVLRVEMGRQFGFEVHRSRPSFRQFQAINHLVLFDNALRKYDSGQVAAGFQRALLVAGPETADTRPDLRKLNEWVFGGRAAGGRQLADELKIVSALRDTYSGHLVLQPTETLDTWKVLSRDTRTAHSLEHGFIHAAGTIQANCPQLFMRRQHPGLFPFVNAIASSLGWYYQTATGPGADARAAARRQQAFQTRAAAECHAKSGVPVVAGFYRTINATLKGGEGLQPTMFNGELGAIKHQALDTVRYDYGHYLIMLGPFQPWSGLTAPPCPYAESSWAQAAVQTALELFSALYPAPCISGYARPPGPSAVIEHLGSLVPKGGLLLFLSHLPDDVKDGLGEMGPARATGPGMQQFVSSYFLNPACSNVFITVRQRGEKINGRTVLQALGRACDMAGCQHYVLGSTVPLGGLNFVNDLASPVSTAEMMDDFSPFFTVEFPPIQEEGASSPVPLDVDESMDISPSYELPWLSLESCLTSILSHPTVGSKEHLVRHTDRVSGGRVAQQPGVGPLDLPLADYAFVAHSQVWTRPGGAPPLPYRTWDRMTEKLLVSAKPGGENVKVSGTVITLGEQGYKVSLDLREGTRLAMAEALLNAACAPILDPEDVLLTLHLHLDPRRADNSAVMEAMTAASDYARGLGVKLTFGSASCPETGSSASNFMTVVASVSAPGEFSGPLITPVLQKTGSLLIAVRCGDGKIQGGSLFEQLFSDVATTPRAPEALSLKNLFRAVQQLVKSGIVLSGHDISDGGLVTCLVEMALAGQRGVTITMPVASDYLPEMFAEHPGLVFEVEERSVGEVLQTLRSMNMYPAVLGRVGEQGPDQMFEVQHGPETVLRQSLRLLLGTWSSFASEQYECLRPDRINRSMHVSDYGYNEALAVSPLTGKNLSPRRLVTEPDPRCQVAVLCAPGTRGHESLLAAFTNAGCLCRRVFFREVRDNTFLDKYVGLAIGGVHGARDSALAGRATVALINRFPALRDAILKFLNRPDTFSVALGELGVQVLAGLGAVGSTDNPPAPGVEVNVQRSPLILAPNASGMFESRWLNISIPATTSSVMLRGLRGCVLPCWVQGSCLGLQFTNLGMPYVLQNAHQIACHFHSNGTDAWRFAMNYPRNPTEQGNIAGLCSRDGRHLALLCDPSLCTDFWQWEHIPPAFGHPTGCSPWTLMFQAAHLWSLRHGRPSE

SEQ ID NO: 775 - protein, 364 aa, Epstein-Barr virus
MKVQGSVDRRRLQRRIAGLLPPPARRLNISRGSEFARDVRGLVEEHAQASSLSAAAVWRAGLLAPGEVAVAGGGSGGGSFSWSGWRPPVFGDFLIHASSFNNAEATGTPLFQFKQSDPFSGVDAVFTPLSLFILMNHGRGVAARVEAGGGLTRMANLLYDSPATLADLVPDFGRLVADRRFHNFITPVGPLVENIKSTYLNKITTVVHGPVVSKAIPRSTVKVTVPQEAFVDLDAWLSGGAGGGGGGCFVGGLGLQPCPADARLYVALTYEEAGPRFTFFQSSRGHCQIMNILRIYYSPSIMHRYAVVQPLHIEELTFGAVACLGTFSATDGWRRSAFNYRGSSLPVVEIDSFYSNVSDWEVIL

SEQ ID NO: 776 - protein, 134 aa, Variola virus
MDTYMNRLDLDKLKHENIFSGNIIEDAKEFVFGSRKIYTDSVNDLIELYNLAKYLNNEKLKDVVIERMDYVCKYIIGKDNWYTIYSFYKENGLRNSFLRQYINNNIEEIRNTDQFLKFDVDSVCDILNNDETIV

SEQ ID NO: 777 - protein, 635 aa, Vaccinia virus
MLNRIQTLMKTANNYETIEILRNYLRLYIILARNEEGRGILIYDDNIDSVMSMMNITILEVIGLTTHCTKLRSSPPIPMSRLFMDEIDHESYYSPKTSDYPLIDIIRKRSHEQGDIALALEQYGIENTDSISEINEWLSSKGLACYRFVKFNDYRKQMYRKFSRCTIVDSMIIGHIGHHYIWIKNLETYTRPEIDVLPFDIKYISRDELWARISSSLDQTHIKTIAVSVYGAITDNGPMPYMISTYPGNTFVNFNSVKNLILNFLDWIKDIMTSTRTIILVGYMSNLFDIPLLTVYWPNNCGWKIYNNTLISSDGARVIWMDAYKFSCGLSLQDYCYHWGSKPESRPFDLIKKSDAKRNSKSLVKESMASLKSLYEAFETQSGALEVLMSPCRMFSFSRIEDMFLTSVINRVSENTGIGMYYPTNDIPFLFIESSICLDYIIVNNQESNKYRIKSVLDIISSKQYPAGRPNYVKNGTKGKLYIALCKVTVPTNDHIPVVYHDDDNTTTFITVLTSVDIETAIRAGYSIVELGALQWDNNIPELKNGLLDSIKMIYDLNAVTTNNLLEQLIENINFNNSSIISLFYTFAISYCRAFIYSIMETIDPVYISQFSYKELYVSSSYKDINESMSQMVKL

SEQ ID NO: 778 - protein, 66 aa, Vaccinia virus
MFVYKNNFRIQYDRRSFFKCFRYVFFEIIHFMREYWFHVSTKEGKLVIIFMNLYSFTIVFDFRKHS

SEQ ID NO: 779 - protein, 579 aa, Human herpesvirus
MTARYGFGSISFPNKCGIFLSTTKNFIAPNFPIHYWTAPAFELRGRMNPDLEKNTLTLKNAAAVAALDNLRGETITLPTEIDRRLKPLEEQLTRMAKVLDSLETAAAEAEEADAQSEECTRTEIIRNESIHPEVQIAKNDAPLQYDTNFQVDFITLVYLGRARGNNSPGIVFGPWYRTLQERLVLDRPVAARGVDCKDGRISRTFMNTTVTCLQSAGRMYVGDRAYSAFECAVLCLYLMYRTSNSVHEPQVSSFGNLIEHLPEYTETFVNYMTTHENKNSYQFCYDRLPRDQFHARGGRYDQGALTSHSVMDALIRLQVLPPAPGQFNPGVNDIIDRNHTAYVDKIQQAAAAYLERAQNVFLMEDQTLLRLTIDTITALLLLRRLLWNGNVYGDKLKNNFQLGLIVSEATGTPTNNVILRGATGFDGKFKSGNNNFQFLCERYIAPLYTLNRTTELTEMFPGLVALCLDAHTQLSRGSLGRTVIDISSGQYQDRLISLIALELEHRRQNVTSLPIAAVVSIHDSVMLQYERGLGMLMHQPRVRAALEESRRLAQFNVNSDYDLLYFVCLGVIPQFASTP

SEQ ID NO: 780 - protein, 493 aa, Vaccinia virus
MSLLKMEYNLYAELKKMTCGQPLSLFNEDGDFVEVEPGSSFKFLIPKGFYASPSVKTSLVFETLTTTDNKITSINPTNAPKLYPLQRKVVSEVVSNMRKMIESKRPLYITLHLACGFGKTITTCYLMATHGRKTVICVPNKMLIHQWKTQVEAVGLEHKISIDGVSSLLKELKTQSPDVLIVVSRHLTNDAFCKYINKHYDLFILDESHTYNLMNNTAVTRFLAYYPPMMCYFLTATPRPANRIYCNSIINIAKLSDLKKTIYAVDSFFEPYSTDNIRHMIKRLDGPSNKYHIYTEKLLSVDEPRNQLILDTLVEEFKSGTINRILVITKLREHMVFFYKRLLDLFGPEVVFIGDAQNRRTPDMVKSIKELNRFIFVSTLFYSGTGLDIPSLDSLFICSAVINNMQIEQLLGRVCRETELLDRTVYVFPSTSIKEIKYMIGNFMQRIISLSVDKLGFKQKSYRKHQESDPTSVCTTSSREERVLNRIFNSQNR

SEQ ID NO: 781 - protein, 941 aa, Human cytomegalovirus
MAGAAPRRLGCDALIVVGGSAMPRRVLHVPVHVRACNLTQELSTGEDARFCRPRPVNVERVRAVFAALYRACPIHVRTEPERVKLVLGRLLLGPVAVPCFCDGEVEGHGEHLVPTTQFCRGPLLYVHRRCCCGSVTAGRALSYHVLENHVATHVLRGLLSLTEWNRELPSLFCDCPGGGGASGTEERYAMACLPRDLSLHLDDYPYLMVEIGRVLSVSEVDDYVTAVSGYLGEAAAPRIQVHYKLLFGLNVRPQAPCALDATRDFFLLELQKLWLGVEYHHEVTSEFFGRVLAQLHRDRARVMMALRLPEQTVCHLSTFVLSRFKRQVLYFKLQVSYGKCRTGHADRSGGGGNGGNQGHHNLLCYRRLSVTFADTDTVWRNLFYVYYELARDLGSHGTENRPVNRGYGVSCAPRTSRLSPSESTVVSANGHALSSTALPTTSAGHKLSLPRDPAADRVRRYVCIISRLMYARYGERWRKHRQRRSETGEEEEEETLESGETDATPPFDFTGQQLRRAYQEHRRRKHLAVQRYAPCRRKLIGGMEFAEVTGVSLDRIAVNAFNTNRVINMKAALSSIAASGLGVRAPRLPKNMTHSFVMYKHTFKEPACTVSTFVSNDAVYINSLNVNIRGSYPEFLYSLGVYRLHVNIDHFFLPAVVCNSNSSLDVHGLEDQAVIRSERSKVYWTTNFPCMISHTNNVNVGWFKAATAIVPRVSGADLEAILLKELSCIKNMRDVCIDYGLHRVFTQLELRNSYQIPFLAKQLVLFLRACLLKLHGREKRLQLDRLVFEAAQRGLFDYSKNLTAHTKIKHTCALIGSRLANNVPKILARNKKVKLDHLGRNANVLTVCRHVEAHKIPRTRLKVLVEVLGVLQSISGTPHTREVIHQTLFRLCSAAAATSGLCSSPPPLCVSSSSSVPSVPTSVSVDGSSEPTSPRVRFASR

SEQ ID NO: 782 - protein, 1318 aa, Epstein-Barr virus
MEERGRETQMPVARYGGPFIMVRLFGQDGEANIQEQRLYELLSDPRSALGLDPGPLIAENLLLVALRGTNNDPRPQRQERARELALVGILLGNGEQGEHLGTESALEASGNNYVYAYGPDWMARPSTWSAEIQQFLRLLGATYVLRVEMGRQFGFEVHRSRPSFRQFQAINHLVLFDNALRKYDSGQVAAGFQRALLVAGPETADTRPDLRKLNEWVFGGRAAGGRQLADELKIVSALRDTYSGHLVLQPTETLDTWKVLSRDTRTAHSLEHGFIHAAGTIQANCPQLFMRRQHPGLFPFVNAIASSLGWYYQTATGPGADARAAARRQQAFQTRAAAECHAKSGVPVVAGFYRTINATLKGGEGLQPTMFNGELGAIKHQALDTVRYDYGHYLIMLGPFQPWSGLTAPPCPYAESSWAQAAVQTALELFSALYPAPCISGYARPPGPSAVIEHLRSLVPKGGLLLFLSHLPDDVKDGLGEMGPARATGPGMQQFVGSYFLNPACSNVFITVRQRGEKINGRTVLQALGRACDMAGCQHYVLGSTVPLGGLNFVNDLASPVSTAEMMDDFSPFFTVEFPPIQEEGASSPVPLDVDESMDISPSYELPWLSLESCLTSILSHPTVGSKEHLVRHTDRVSGGRVAQQPGVGPLDLPLADYAFVAHSQVWTRPGGAPPLPYRTWDRMTEKLLVSAKPGGENVKVSGTVITLGEQGYKVSLDLREGTRLAMAEALLNAAFAPILDPEDVLLTLHLHLDPSRADNSAVMEAMTAASDYARGLGVKLTFGSASCPETGSSASSFMTVVASVSAPGEFSGPLITPVLQKTGSLLIAVRCGDGKIQGGSLFEQLFSDVATTPRAPEALSLKNLFRAVQQLVKSGIVLSGHDISDGGLVTCLVEMALAGQRGVTITMPVASDYLPEMFAEHPGLVFEVEERSVGEVLQTLRSMNMYPAVLGRVGEQGPDQMFEVQHGPETVLRQSLRLLLGTWSSFASEQYECLRPDRINRSMHVSDYGYNEALAVSPLTGKNLSPRRLVTEPDPRCQVAVLCAPGTRGHESLLAAFTNAGCLCRRVFFREVRDNTFLDKYVGLAIGGVHGARDSALAGRATVALINRSPALRDAILKFLNRPDTFSVALGELGVQVLAGLGAVGSTDNPPAPGVEVNVQRSPLILAPNASGMFESRWLNISIPATTSSVMLRGLRGCVLPCWVQGSCLGLQFTNLGMPYVLQNAHQIACHFHSNGTDAWRFAMNYPRNPTEQGNIAGLCSRDGRHLALLCDPSLCTDFWQWEHIPPAFGHPTGCSPWTLMFQAAHLWSLRHGRPSE

SEQ ID NO: 783 - protein, 39 aa, Epstein-Barr virus
MVPSQRLSRTSSISSNEDPAGKKLHRPVAGAVEPGASGA

SEQ ID NO: 784 - protein, 156 aa, Variola virus
MNVYNKADSFSLESDSIKDVIHDYICWLSMTDEMRPSIGNVFKAMETFKIDAVRYYDGNIYDLAKDINAMSFDSFIRSLQNISSKKDKLTVYGTMGLLSIVVDINKGCDISNIKFAAGIIILMEYIFDNTDMSHLKVALYRRIQRRYPIDDDEEDR

SEQ ID NO: 785 - protein, 666 aa, Vaccinia virus
MFMYPEFARKALSKLISKKLNIEKVSSKHQLVLLDYGLHGLLPKSLYLEAINSDILNVRFFPPEIINVTDIVKALQNSCRVDEYLKSVSLYHKNSLMVSGPNVVKLMIEYNLLTHSDLEWLINENVVKATYLLKINAYMINFKIDLTVDEIIDLVKDIPVGATLHLYNILNNIDLDIVLRISDEYNIPPVHDILSKLTDEEMCIKLVTKYPMDNVINFINQDVRYSPTFIKTIKDFVNKHLPTMYDGLNDYLHSVIIDEDLIEEYKIKSVAMFNLEYKTDVDTLTLDEQIFVEVNISYYDFRYRQFADEFRDYIMIKERRQITMQSGDRIRRFRRPMSLRSTIIKKDTDSLEDILAHIDNARKNSKVSIEDVERIISSFRLNPCVVRRTMLSDIDIKTKIMVLKIVKDWKSCALTLSAIKGIMVTDTINTVLSKILHHHRNVFKYLTSVENKEIAVCNCSRCLSLFYRELKSVRCDLRTDDGLLDRLYDLTRYALHGKINQNLIGQRCWGPLTEMLFNENKKKKLNNLMEYIKISDMLVYGHSIEKTLIPITDSLSFKLSVDTMSVLNDQYAKIVIFFNTIIEYIIATIYYRLTVLDNYTNVKHFVSKVLHTVMEACGVLFSYIKVNDKIEHELEEMVDKGTVPSYLYHLSINVISIILDDINGTR

SEQ ID NO: 786 - protein, 72 aa, Vaccinia virus
MIFFFISNWFRSLVCCGFSRCCTYCINAITSVCDGVCMIFYIISNWFRSRDFEYRRAIRIIYIIRFLRTSFW

SEQ ID NO: 787 - protein, 235 aa, Human herpesvirus
MTQPASSRVVFDPSNPTTFSVEAIAAYTPVALIRLLNASGPLQPGHRVDIADARSIYTVGAAASAARARANHNANTIRRTAMFAETDPMTWLRPTVGLKRTFNPRIIRPQPPNPSMSLGISGPTILPQKTQSADQSALQQPAALAFSGSSPQHPPPQTTSASVGQQQHVVSGSSGQQPQQGAQSSTVQPTTGSPPAAQGVPQSTPPPTQNTPQGGKGQTLSHTGQSGNASRSRRV

SEQ ID NO: 788 - protein, 90 aa, Variola virus
MDMMLMIGNYFSGVLIAGIILLILSCIFAFIDFSKSTSPTRTWKVLSIMSFILGIIITVGMLIYSMWGKHCAPHRVSGVIHTNHSDISVN

SEQ ID NO: 789 - protein, 124 aa, Human cytomegalovirus
GISTFFLSVTLFTVNRTCDLLTPPPWYPITVKNTHHTSRHRSIFFILSVMIGKGTREDVQLSLSSLFQGVVMIVGQNPQAPSDLGIEGGERAQGQNAHSVHGPGLQTERGGSQLQMVGHPLREL

SEQ ID NO: 790 - protein, 1318 aa, Epstein-Barr virus
MEDRGRETQMPVARYGGPFIMVRLFGQDGEANIQEQRLYELLSDPRSALGLDPGPLIAENLLLVALRGTNNDPRPQRQERARELALVGILLGNGEQGEHLGTESALEASGNNYVYAYGPDWMARPSTWSAEIQQFLRLLGATYVLRVEMGRQFGFEVHRSRPSFRQFQAINHLVLFDNALRKYDSGQVAAGFQRALLVAGPETADTRPDLRKLNEWVFGGRAAGGRQLADELKIVSALRDTYSGHLVLQPTETLDTWKVLSRDTRTAHSLEHGFIHAAGTIQANCPQLFMRRQHPGLFPFVSAIASSLGWYYQTATGPGADARAAARRQQAFQTRAAAECHAKSGVPVVAGFYRTINATLKGGEGLQPTMFNGELGAIKHQALDTVRYDYGHYLIMLGPFQPWSGLTAPPCPYAESSWAQAAVQTALELFSALYPAPCISGYARPPGPSAVIEHLGSLVPKGGLLLFLSHLPDDVKDGLGEMGPARATGPGMQQFVSSYFLNPACSNVFITVRQRGEKINGRTVLQALGRACDMAGCQHYVLGSTVPLGGLNFVNDLASPVSTAEMMDDFSPFFTVEFPPIQEEGARSPVPLDVDESMDISPSYELPWLSLESCLTSILSHPTVGSKEHLVRHTDRVSGGRVAQQPGVGPLDLPLADYAFVAHSQVWTRPGGAPPLPYRTWDRMTEKLLVSAKPGGENVKVSGTVITLGEQGYKVSLDLREGTRLAMAEALLNAAFAPILDPEDVLLTLHLHLDPRRADNSVVMEAMTAASDYARGLGVKLTFGSASCPETGSSASSFMTVVASVSAPGEFSGPLITPVLQKTGSLLIAVRCGDGKIQGGSLFEQLFSDVATTPRAPEALSLKNLFRAVQQLVKSGIVLSGHDISDGGLVTCLVEMALAGQRGVTITMPVASDYLPEMFAEHPGLVFEVEERSVGEVLQTLRSMNMYPAVLGRVGEQGPDQMFEVQHGPETVLRQSLRLLLGTWSSFASEQYECLRPDRINRSMHVSDYGYNEALAVSPLTGKNLSPRRLVTEPDPRCQVAVLCAPGTRGHESLLAAFTNAGCLCRRVFFREVRDNTFLDKYVGLAIGGVHGARDSALAGRATVALINRSPALRDAILKFLNRPDTFSVALGELGVQVLAGLGAVGSTDNPPAPGVEVNVQRSPLILAPNASGMFESRWLNISIPATTSSVMLRGLRGCVLPCWVQGSCLGLQFTNLGMPYVLQNAHQIACHFHSNGTDAWRFAMNYPRNPTEQGNIAGLCSRDGRHLALLCDPSLCTDFWQWEHIPPAFGHPTGCSPWTLMFQAAHLWSLRHGRPSE

SEQ ID NO: 791 - protein, 92 aa, Molluscum contagiosum virus
MILKEPFIVDTVQGRFLVLKYVKLCGVKTVECKGATASCVLKVEKPESPCERRSPSPPPSPGKCEPQVPFMRTNLLASMFSENKNNAAKMLA

SEQ ID NO: 792 - protein, 150 aa, Variola virus
MGIQHEFDIIINGDIALRNLQLHRGDNYGCKLKIISNDYKKLKFRFIIRPDWSEIDEVKGLTVFANNYAVKVNKVDDTFYYVIYEAVIHLYNKKTEILIYSDDENELFKHYYPYISLNMISKKYKVKEENYSSPYIEHPLIPYRDYESMD

SEQ ID NO: 793 - protein, 319 aa, Vaccinia virus
MEPILAPNPNRFVIFPIQYHDIWNMYKKAEASFWTVEEVDISKDINDWNKLTPDEKYFIKHVLAFFAASDGIVNENLAERFCTEVQITEARCFYGFQMAIENIHSEMYSLLIDTYVKDSNEKNYLFNAIETMPCVKKKADWAQKWIHDSAGYGERLIAFAAVEGIFFSGSFASIFWLKKRGLMPGLTFSNELISRDEGLHCDFACLMFKHLLHPPSEETVRSIITDAVSIEQEFLTAALPVKLIGMNCEMMKTYIEFVADRLISELGFKKIYNVTNPFDFMENISLEGKTNFFEKRVGEYQKMGVMSQEDNHFSLDVDF

SEQ ID NO: 794 - protein, 65 aa, Vaccinia virus
MSTHSTFFNRLYSIFLIFSIISELSSIGSCILSESVTCLNNSLMSFLIQSNSLLNSLIVCRPLSS

SEQ ID NO: 795 - protein, 483 aa, Human herpesvirus
MGSQPTNSHFTLNEQTLCGTNISLLGNNRFIQIGNGLHMTYAPGFFGNWSRDLTIGPRFGGLNKQPIHVPPKRTETASIQVTPRSIVINRMNNIQINPTSIGNPQVTIRLPLNNFKSTTQLIQQVSLTDFFRPDIEHAGSIVLILRHPSDMIGEANTLTQAGRDPDVLLEGLRNLFNACTAPWTVGEGGGLRAYVTSLSFIAACRAEEYTDKQAADANRTAIVSAYGCSRMETRLIRFSECLRAMVQCHVFPHRFISFFGSLLEYTIQDNLCNITAVAKGPQEAARTDKTSTRRVTANIPACVFWDVDKDLHLSADGLKHVFLVFVYTQRRQREGVRLHLALSQLNEQCFGRGIGFLLGRIRAENAAWGTEGVANTHQPYNTRALPLVQLSNDPTSPRCSIGEITGVNWNLARQRLYQWTGDFRGLPTQLSCMYAAYTLIGTIPSESVRYTRRMERFGGYNVPTIWLEGVVWGGTNTWNECYY

SEQ ID NO: 796 - protein, 77 aa, Vaccinia virus
MDSTNVRSGMKSRKKKPKTTVIDDDDDCMTCSACQSKLVKISDITKVSLDYINTMRGNTLACAACGSSLKLLNDFAS

SEQ ID NO: 797 - protein, 258 aa, Varicella-zoster virus
MSASRIRAKCFRLGQRCHTRFYDVLKKDIDNVRRGFADAFNPRLAKLLSPLSHVDVQRAVRISMSFEVNLGRRRPDCVCIIQTESSGAGKTVCFIVELKSCRFSANIHTPTKYHQFCEGMRQLRDTMALIKETTPTGSDEIMVTPLLVFVSQRGLNLLQVTRLPPKVIHGNLVMLASHLENVAEYTPPIRSVRERRRLCKKKIHVCSLAKKRAKSCHRSALTKFEENAACGVDLPLRRPSLGACGGILQSITGMFSHG

SEQ ID NO: 798 - protein, 254 aa, Human metapneumovirus
MESYLVDTYQGIPYTAAVQVDLVEKDLLPASLTIWFPLFQANTPPAVLLDQLKTLTITTLYAASQSGPILKVNASAQGAAMSVLPKKFEVNATVALDEYSKLEFDKLTVCEVKTVYLTTMKPYGMVSKFVSSAKPVGKKTHDLIALCDFMDLEKNTPVTIPAFIKSVSIKESESATVEAAISSEADQALTQAKIAPYAGLIMIMTMNNPKGIFKKLGAGTQVIVELGAYVQAESISKICKTWSHQGTRYVLKSR

SEQ ID NO: 799 - protein, 143 aa, Molluscum contagiosum virus
MDADLKLLAETLFAGVLSTKDVYVLAREMRGQSPRRTVFSVDAQGCVGVDFEYDGFRASDYLGTPRTALPPAEYRAHAALVARELTAVDMIDEDPAAYMRASPHLRRLMRVARDRKRMAAIARTQQRAARRGLDCAFIKDVVF

SEQ ID NO: 800 - protein, 634 aa, Vaccinia virus
MVNDKILYDSCKTFNIDASSAQSLIESGANPLYEYDGETPLKAYVTKKNNNIKNDVVILLLSSVDYKNINDFDIFEYLCSDNIDIDLLKLLISKGIEINSIKNGINIVEKYATTSNPNVDVFKLLLDKGIPTCSNIQYGYKIKIEQIRRAGEYYNWDDELDDYDYDYTTDYDDRMGKTVLYYYIITRSQDGYATSLDVINYLISHKKEMRYYTYREHTTLYYYLDKCDIKREIFDALFDSNYSGHELMNILSNYLRKQFRKKNHKIDNYIVDQLLFDRDTFYILELCNSLRNNILISTILKRYTVSIQDLLLEYVSYHTVYINVIKCMIDEGATLYRFKHINKYFQKFGNRDPKVVEYILKNGNLVVDNDNDDNLINIMPLFPTFSMRELDVLSILKLCKPYIDDINKIDKHGCSILYHCIKSHSVSLVEWLIDNGADINIITKYGFTCITICVILADKYIPEIAELYIKILEIILSKLPTIECIKKTVDYLDDHRYLFIGGNNKSLLKICIKYFILVDYKYTCSMYPSYIEFITDCEKEIADMRQIKINGTDMLTVMYMLNKPTKKRYVNNPIFTDWANKQYKFYNQIIYNANKLIEQSKKIDDMIEEVSIDDNRLSTLPLEIRHLIFSYAFL

SEQ ID NO: 801 - protein, 558 aa, Vaccinia virus
MDFFKKEILDWSVYLSLHYIARVFSNFSTSHIIQDYNLVRTYEKVDKTIVDFLSRLPNLFHILEYGENILHIYSMDDANTNIIIFFLDRVLNINKNGSFIHNLRLSSSINIKEYVYQLVNNDHPDNRIRLMLENGRRTRHFLSYISDTVNIYICILINHGFYIDAEDSYGCTLLHRCIYHYKKSESESYNELIKILLNNGSDVDKKDTYGNTPFILLCKHDINNVELFEICLENANIDSVDFNRYTPLHYVSCRNKYDFVKLLISKGANVNARNKFGTTPFYCGIIHGISLIKLYLESDTELEIDNEHIVRHLIIFDAVESLDYLLSRGVIDINYRTIYNETSIYDAVSYNAYNTLVYLLNRNGDFETITTSGCTCISEAVANNNKIIMEVLLSKRPSLKIMIQSMIAITKHKQHNADLLKMCIKYTACMTDYDTLIDVQSLQQYKWYILRCFDEIDIMKRCYIKNKTVFQLVFCIKDINTLMRYGKHPSFVKCTSLDVYGSRVRNIIASIRYRQRLISLLSKKLDPGDKWSCFPNEIKYKILENFNDNELSTYLKIL

SEQ ID NO: 802 - protein, 69 aa, Vaccinia virus
MKILTIEYASSSLRLSNSVHSGLLSIYLFNSSHLNASTNLGSSFCLHADGTPIVLRTKITSLPLIAASI

SEQ ID NO: 803 - protein, 72 aa, Molluscum contagiosum virus
MERLYAGIFGVFMTTPEDDFEEFLEVVQAVLTDSPRAARRAPRAQSLLLFVLFAALLAAILLFLYLKLARRK

SEQ ID NO: 804 - protein, 76 aa, Variola virus
MSWYEKYNIVLNPPKRCFSSCADNLTTILAEDGNNIRAILYSQPQKLKVLQDFLATSRNKMFLYKILDDEIRRVLT

SEQ ID NO: 805 - protein, 429 aa, Human cytomegalovirus
MMEAAAAAAAAFRPEERPTPGWHDAALLMDDGTVREHAFRNGPLSQLIRRVLPPPPDAEDDVVFASELCFYCSGRFNRRSSVFSIYWQKHSDLVYALTGITHCAKLVVECGQLGSSRLRWRDGDASGEERRGDDDSRDELYDVPGIYMIRVNDGGSTGPRHVIWPGTSVLWAPDVVITTVQRRISAARALVNTFRQYFFLLERRSHEELVLCPPEMEERLAPLLQSATRGDSDMFDGVVASAYHRLRMSNIPRSSARLLEHCVGLAGAKKLLLLDVPRLENYFLCQVCLYELDEDEMGEEMLGMLAGKPEDAAVSGASGGFLLHRKTMKLAACLCLLLNSLHLHQEALEALDPPPPRVEENDLVNVVLRRYYRSHGGVQARTLAAARALLADYAETFSPLGSFTRLGYDRLVSADAGVSRRHLVALLRA

SEQ ID NO: 806 - protein, 128 aa, Encephalomyocarditis virus
PFMFRPRKQVFPDPRSGSVINGSNPTAERPCQQSYGISFYGFARCQRGRPKSNEDYKDIKFSIGCMGKCKRNTKQPRVLEAALEQMCAADCRDDNSSDASGPFDSALLRNIDGRRDYKPDKSVRRNSS

SEQ ID NO: 807 - protein, 421 aa, Molluscum contagiosum virus
MARNLREAMAESLGRTSRSLAAEQSVLFSRLEVRIEVEEQIEAREDIDLKAQGAALQRRLRAALRSTPAAYARQRVGTSSHTVPAAVAVQTCPTPAIAAAQTCPMPATAPAAAQACPMPGPVSSLGTTTCPMPESTSACSALATTLPTRPPVPPRPSILSIRVPEQLPRRNPLDPTLNMLLAKPPPPVAAARLRFALSPDGEPAPSPARDTDTCPAPATAPACPAPATSPACPAPATAPACPAPATAPACPAPATAPACPAPATAPACPAPACPTPACPAPATAPACAVPSVRQELQSLQQDTLALQTQANGLLSEIQDARQSTVGAIDDLKSLFENLHATLRRSRERLRPEDDDDDDDEDDDGAGGARGCYTVLEGPELRKLCRGLSEACRAVESLRELLALEPRSRANSPPAECEKLRI

SEQ ID NO: 808 - protein, 745 aa, Torque teno virus
  misc_feature (328)..(328): Xaa can be any naturally occurring amino acid
  misc_feature (334)..(334): Xaa can be any naturally occurring amino acid
  misc_feature (364)..(364): Xaa can be any naturally occurring amino acid
MAWGWWRRWRRWPARRWRRRRRRRPLRRRRAGRPARRYRRRRTVRTRRRRWGRRRYRRGWRRRTYVRKGRHRKKKKRLILRQWQPATRRRCTITGYLPIVFCGHTKGNKNYALHSDDYTPQGQPFGGALSTTSFSLKVLFDQHQRGLNKWSFPNDQLDLARYRGCKFIFYRTKQTDWIGQYDISEPYKLDKYSCPNYHPGNLIKAKHKFLIPSYDTNPRGRQKIIVKIPPPDLFVDKWYTQEDLCSVNLVSLAVSAASFLHPFGSPQTDNPCYTFQVLKEFYYQAIGFSATDESRNYVFNVLYEENSYWESNITPFYVINVKKGSNTXDYMSPXISDSHFRNKVNTNYNWYTYNAKSHKNDLHXLRRAYFKQLTTEGPQQTSSEKGYASQWTTPTTDAYEYHLGMFSTIFLAPDRPVPRFPCAYQDVTYNPLMDKGVGNHVWFQYNTKADTQLIVTGGSCKAHIEDIPLWAAFYGYSDFIESELGPFVDAETVGLICVICPYTKPPMYNKTNPMMGYVFYDRNFGDGKWIDGRGKIEPYWQVRWRPEMLFQETVMADIVQTGPFSYKDELKNSTLVAKYKFYFTWGGNMMFQQTIKNPCKTDGRPTDSDRHPRGIQVADPEQMGPRWVFHSFDWRRGYLSEGAIKRLHEKPLDYESYFTQPKRPRIFPPTEAAEGEFREPEKGSYSEEERSQASAEEQATEETVLLLKRRLREQRKLEQQLQFLTREMFKTQAGLHINPMLLSQR

SEQ ID NO: 809 - protein, 288 aa, Vaccinia virus
MFEPVPDLNLEASVELGEVNIDQTTPMIKENSGFISRSRRLFAHRSKDDERKLALRFFLQRLYFLDHREIHYLFRCVDAVKDVTITKKNNIIVAPYIALLTIASKGCKLTETMIEAFFPELYNEHSKKFKFNSQVSIIQEKLGYQFGNYHVYDFEPYYSTVALAIRDEHSSGIFNIRQESYLVSSLSEITYRFYLINLKSDLVQWSASTGAVINQMVNTVLITVYEKLQLVIENDSQFTCSLAVESKLPIKLLKDRNELFTKFINELKKTSSFKISKRDKDTLLKYFT

SEQ ID NO: 810 - protein, 129 aa, Human cytomegalovirus
MRLCRVWLSVCLCAVVLGQCQRETAEKNDYYRVPHYWDACSRALPDQTRYKYVEQLVDLTLNYHYDASHGLDNFDVLKRINVTEVSLLISDFRRQNRRGGTNKRTTFNAAGSLAPHARSLEFSVRLFAN

SEQ ID NO: 811 - protein, 82 aa, Molluscum contagiosum virus
MALPGKDIVAAVALTVLMLLMVVSGGALVTKGIPPLRLLTLRSARAARVVAVLEVVAVVLIVPGTLALYSAYVRQLWARSQN

SEQ ID NO: 812 - protein, 322 aa, Vaccinia virus
MANIINLWNGIVPTVQDVNVASITAFKSMIDETWDKKIEANTCISRKHRNIIHEVIRDFMKAYPKMDENRKSPLGAPMQWLTQYYILKNEYHKTMLAYDNGSLNTKFKTLNIYMITNVGQYILYIVFCIISGKNHDGTPYIYDSEITSNDKNLINERIKYACKQILHGQLTIALRIRNKFMFIGSPMYLWFNVNGSQRRMKAEREIARKNCGGNPCERELKSERSNVKRLEYQLDAEKEKVKFYKRELERDRYLSSRYLTSSSDPHEKPLPNYTFPRIKNVSPLTTEATGSVEVAPPSTDVTEPISDVTPSVDVEPEHPPAF

SEQ ID NO: 813 - protein, 353 aa, Human herpesvirus
MWVMSQVRSMEPDLTLAAVYQAAANLTEQDKEIFSEAVKTAFSVCSSAAPSARLRMIETPTQNFMFVTSVIPSGVPSGEKKTKLNIDAALDNLALSFANKKSKKMARTYLLQNVSRTQDQQVAISGTYILYTKKHIETSLMLDKTKLVKQILEYAETPNLLGYTDVRDLECLLWLVFCGPKSFCQSDSCFGYSKTGYNAAFPNLLPPYLYECGQNNGLFFGIVQAYVFSWYSDFDFSALEISERARRRIRSLLYDLKQKFSEQEISVLPVASQMCIFCALYKQNKLSLEYVSGDLKTSVFSPIIIKDCLCVQTTISTTQMLPGTKSSAIFPVYDLRKLLSALVISEGSVRFDI

SEQ ID NO: 814 - protein, 470 aa, Epstein-Barr virus
MADVDELEDPMEEMTSYTFARFLRSPETEAFVRNLDRPPQMPAMRYVYLYCLCKQIQEFSGETGFCDFVSSLVQENDSQDGPSLKSIYWGLQEATDEQRTVLCSYVESMTRGQSENLMWDILRNGIISSSKLLSTIKNGPTKVFEPAPISTNHYFGGPVAFGLRCEDTVKDIVCKLICGDASANRQFGFMISPTDGIFGVSLDLCVNVESQGDFILFTDRSCIYEIKCRFKYLFSKSEFDPIYPSYTALYKRPCKRSFIRFINSIARPTVEYVPDGRLPSEGDYLLTQDEAWNLKDVRKRKLGPGHDLVADSLAANRGVESMLYVMTDPSENAGRIGIKDRVPVNIFINPRHNYFYQVLLQYKIVGDYVRHSGGGKPGRDCSPRVNIVTAFFRKRSPLDPATCTLGSDLLLDASVEIPVAVLVTPVVLPDSVIRKTLSTAAGSWKAYADNTFDTAPWVPSGLFADDESTP

SEQ ID NO: 815 - protein, 311 aa, Cercopithecine herpesvirus
MSTERRGGVEMRIYRQPLLRRRDALRAPLASPERLDGPDPPGSRESLDNPAYRGNHASLASPESLGSLGDPASRGSPASRGPRVITYSPPRHTTPGVDEVSGQTRSPREVHESSRPLARRGAKLRPRASIHARAMPYAAAPAPGTRRPSRRRREDGASGPPDPRGATVALLYPLCDQPSAHLQTLPLEHRPLFRVIVEASRESSRKGDAPPSRRTGTRIHRELKLAHNQWIRANRESAIWPWRTAAMNFVAALAPRLQTHQHMHDLLMTCAFWCCLAHAATCSCAGLYSTHCRHLFRAFGCGGPASATASG

SEQ ID NO: 816 - protein, 952 aa, Human adenovirus
MATPSMMPQWSYMHISGQDASEYLSPGLVQFARATETYFSLNNKFRNPTVAPTHDVTTDRSQRLTLRFIPVDREDTAYSYKARFTLAVGDNRVLDMASTYFDIRGVLDRGPTFKPYSGTAYNALAPKGAPNPCEWDEAATALEINLEEEDDDNEDEVDEQAEQQKTHVFGQAPYSGINITKEGIQIGVEGQTPKYADKTFQPEPQIGESQWYETEINHAAGRVLKKTTPMKPCYGSYAKPTNENGGQGILVKQQNGKLESQVEMQFFSTTEATAGNGDNLTPKVVLYSEDVDIETPDTHISYMPTIKEGNSRELMGQQSMPNRPNYIAFRDNFIGLMYYNSTGNMGVLAGQASQLNAVVDLQDRNTELSYQLLLDSIGDRTRYFSMWNQAVDSYDPDVRIIENHGTEDELPNYCFPLGGVINTETLTKVKPKTGQENGWEKDATEFSDKNEIRVGNNFAMEINLNANLWRNFLYSNIALYLPDKLKYSPSNVKISDNPNTYDYMNKRVVAPGLVDCYINLGARWSLDYMDNVNPFNHHRNAGLRYRSMLLGNGRYVPFHIQVPQKFFAIKNLLLLPGSYTYEWNFRKDVNMVLQSSLGNDLRVDGASIKFDSICLYATFFPMAHNTASTLEAMLRNDTNDQSFNDYLSAANMLYPIPANATNVPISIPSRNWAAFRGWAFTRLKTKETPSLGSGYDPYYTYSGSIPYLDGTFYLNHTFKKVAITFDSSVSWPGNDRLLTPNEFEIKRSVDGEGYNVAQCNMTKDWFLVQMLANYNIGYQGFYIPESYKDRMYSFFRNFQPMSRQVVDDTKYKDYQQVGILHQHNNSGFVGYLAPTMREGQAYPANFPYPLIGKTAVDSITQKKFLCDRTLWRIPFSSNFMSMGALTDLGQNLLYANSAHALDMTFEVDPMDEPTLLYVLFEVFDVVRVHRPHRGVIETVYLRTPFSAGNATT

SEQ ID NO: 817 - protein, 219 aa, Vaccinia virus
MAMFYAHALGGYDENLHAFPGISSTVANDVRKYSVVSVYNNKYDIVKDKYMWCYSQVNKRYIGALLPMFECNEYLQIGDPIHDQEGNQISIITYRHKNYYALSGIGYESLDLCLEGVGIHHHVLETGNAVYGKVQHDYSTIKEKAKEMSTLSPGPIIDYHVWIGDCICQVTAVDVHGKEIMRMRFKKGAVLPIPNLVKVKLGENDTENLSSTISAAPSR

SEQ ID NO: 818 - protein, 106 aa, Human herpesvirus
MAHAKKRVRRKLLTSTDDPILSNTFTMRPTSKIADAEIISREHDYIASKTQTDSKKISPLSVILDKTVLFEFYGIGDNNEKAIVYPIDPDFLLCDSEHNCTLSPFL

SEQ ID NO: 819 - protein, 889 aa, Molluscum contagiosum virus
MMPIGNIVTLDQLESSEYVFRLLSTILPSLCLDYKVEPALQHTFVHAFDAIFYPPAGDVARAEELDAAVQQLGINYLLQGPERHYFPAVISADSVEMLPTRAGVSEHANPVACAHSFSELPLFTRELLRLRTSSFEAHARFFGGYVRAPGAPGVRSPVAFPELSFENTYLANMLYPHTLGARDGSFRARTVDGVMVAKDLANLLALRALLTPESRARLEEDFALQQAAQDHGIAITPDPAVDLELTSMPLKPLLMYYQHFADRYALRQLSFNGEPVAQGHLEVASLAASLHYQAQLARLAQLGVPLYDSMELVVYSAGGALARRRVALDGVRFLQLHSLVPHYLTVLSVFARADRAPALKAESSLFWDGLDYQDYKQKKLSDMLFISSCCYVFALFEHNGVTFCSLLSDALAAGHTPSRVCIMPRVVGNKTAPRLIAETLRSINAISLRDFPRPSGSAHDHIGLSEQGFMRFFQLLRLLGARPPETAVKEVLMTYAGVKMGDQGAPHRIRSDSYKAFVMLLFSAMGFRVSVHNSVVGSHNYTTYTVTPRVSRHYIASMLLKASCSRAEADKLMSSAHELLAFMLAAGNARDAHSYRYARRWGACAYGGAARCDGNAATLVQFSAPVGLLERVNVQGLLGADTLNEMLDVDAFLPENAAFKRNLEQLIESEQLSGEAVMHIMPLSLLDRLVTSAGASFVSIGALMDSIGDPAEDCDATNEIVDMINSALRESYAKEASALTAHTINSVAARSERQLQDVRASACQVAGIFKNLARSIYATERIFKARISDDVKAELLEKYKAFVDLSKSLYADLIALEHIKALLYIVKRSGRSLDETEIGPEDLRKSYELIRPKISRLTSYYHDISRAYFEQMKKNLNMLDGSAVSFDTE

SEQ ID NO: 820 - protein, 146 aa, Vaccinia virus
MNSLSIFFIVVATAAVCLLFIQGYSIYENYGNIKEFNATHAAFEYSKSIGGTPALDRRVQDVNDTISDVKQKWRCVVYPGNGFVSASIFGFQAEVGPNNTRSIRKFNTMQQCIDFTFSDVININIYNPCVVPNINNAECQFLKSVL

SEQ ID NO: 821 - protein, 346 aa, Human herpesvirus
MDTDIALAAIYKETTKLNEKDAKIFSEAVQTALTVCKATAPNTRLKLVETPTNNFLLVTNVVPSETSKATTEANLNIDAALEKLASSFNTAVPVKSSKKYLLQNVRKMTSENIALTGSYIIYTKKHIEVAFLLDKSDFVQDILRYAETPSLLGHTDVRDLECLLWLAFCGPMSYCQADNCFGLNKAGYNAPFPILFPPCMYERNMNLSVFFGLLQIYVFSLYRDFSVENSNLQQGIKKRIKLVLSDLRAKERICEEEIGNFPLAAQICLFCALYRQNRLCMEYAANNLSMSVFSPIILKDCTFMQTTVTITQILPGSKEAIIFPVYDIGKLLSALVFSENGVLLKL

SEQ ID NO: 822 - protein, 584 aa, Human cytomegalovirus
MWGVSSLDYDDDEELTRLLAVWDDEPLSLFLMNTFLLHQEGFRNLPFTVLRLSYAYRIFAKMLRAHGTPVAEDFMTRVAALARDEGLRDILGQRHAAEASRAEIAEALERVAERCDDRHGGSDDYVWLSRLLDLAPNYRQVELFQLLEKESRGQSRNSVWHLLRMDTVSATKFYEAFVSGCLPGAAAADGSGGGGSHYTGSRAGVSPGIQFGIKHEGLVKTLVECYVMHGREPVRDGLGLLIDPTSGLLGASMDLCFGVLKQGSGRTLLVEPCARVYEIKCRYKYLRKKEDPFVQNVLRRHDAAAVASLLQSHPVPGVEFRGERETPSAREFLLSHDAALFRATLKRARPLKPPEPLREYLADLLYLNKAECSEVIVFDAKHLNDDNSDGDATITINASLGLAAGDAAGGGADHHLRGSPGDSPPPIPFEDENTPELLGRLNVYEVARFSLPAFVNPRHQYYFQMLIQQYVLSQYYIKKHPDPERIDFRDLPTVYLVSAIFREREESELGCELLAGGRVFHCDHIPLLLIVTPVVFDPQFTRHAVSTVLDRWSRDLSRKTNLPIWVPNSANEYVVSSVPRPVSP

SEQ ID NO: 823 - protein, 1196 aa, Cercopithecine herpesvirus
MEPKAKTTTTIQVPPSPLGYVYARACPAGGLAELSMLSARSGDADVAVSPLVVGLTVESGFEANVAVVVGSRTTGLGGTAVSLKLTPSHFSPSVYVFYGGRHLEPSTRAPNLTRLCERARRQFGFSAYAPKPCELQNETTGEALCERLGLDPERALLYLVVTEGFKEAVCISNTFLHLGGIDEVTVGGDAVRRIPIYPLQMFMPDYNRVIADPFNANHRSIGENFDYPRPFFNRALAGLLFGAVVGPVAVALRTRNVDAVARAAAHLAFDENHEGAALPADITFTMLDGGQGKAPKGGRDGGAGKAAQGGFERRLASVMAGDAALALESLMSMAVFDEPPTDIAAWPLLEGQDTPLARATAIGAYLARAAGLVGAMVFGTNSALHLTEVDDAGPADPKDLSKPSFYRFFLVPGTHVAANPQVDRDGHAVPGHEGRAAAPLVGGNQEFTGEHLAMLCGFSPALLAKMLFYLERCDGGVIVGRQELDVLRYVADSSQTDVPCDLCDLETRHACAHTTLMRLRGRHPRFASAARAPIGVFGTMNSAYSDCEVLGNYAAFSAIKRADVAETARAVMQETYRAATERVMAELENLQYVDPAVPTSLAKLESIITHRDALQTVLTNVRQTVDREVEQLMRNLVEGRNFKFRDGLTEANHAMSLALDPHAGGPCPLLQLLSRRSNLAVYQDLALSQCHGVFASQSVEGRNFRNQFQPVLRRRVMDLFNNGFLPAKTLTIALSDGAAISAPSLTAGQAAPAETGFEGDVARVNLGFPKEMRVKNRVVFAGAGANASEAAKNRVAGMQAAYQKSDKHVDILRGPAGFLLKQFHATLFPNGKPPGSSQPNPQWFWTALQRNQFPAKLLSREDIEALGFIKRFSAEYAASNFVNLAPNNISELAMYYMANQILRYCDHSTYYINTLTAILAGSRRPPSLQAAAAWSPRGGAALEAGTRALVDAIDEHPGAWTTMFASCNLLRPVMAARPMVVLGLSISKYYGMAGNDRVFQAGNWANILGGKNACPLLIFDRTRKFVLACPRAGFVCAASAPGAGAHESSLCEQLRGIIAEGGASVASAVFVAAVKSLGNRTPQLQIEDWLALLEDEYLSEEMMAFTARALERGGGEWAAEAALEVAHEAEALVTQTGGADGGEVFDFGAFGVDDDEVPSFGGFAAHAAGARKRPGAADDLFGDGPPDKRELTLDTL

SEQ ID NO: 824 - protein, 781 aa, Human parvovirus
MSKESGKWWESDDKFAKAVYQQFVEFYEKVTGTDLELIQILKDHYNISLDNPLENPSSLFDLVARIKNNLKNSPDLYSHHFQSHGQLSDHPHALSSSSSHAEPRGENAVLSSEDLHKPGQVSVQLPGTNYVGPGNELQAGPPQSAVDSAARIHDFRYSQLAKLGINPYTHWTVADEELLKNIKNETGFQAQVVKDYFTLKGAAAPVAHFQGSLPEVPAYNASEKYPSMTSVNSAEASTGAGGGGSNPVKSMWSEGATFSANSVTCTFSRQFLIPYDPEHHYKVFSPAASSCHNASGKEAKVCTISPIMGYSTPWRYLDFNALNLFFSPLEFQHLIENYGSIAPDALTVTISEIAVKDVTDKTGGGVQVTDSTTGRLSMLVDHEYKYPYVLGQGQDTLAPELPIWVYFPPQYAYLTVGDVNTQGISGDSKKLASEESAFYVLEHSSFQLLGTGGTATMSYKFPPVPPENLEGCSQHFYEMYNPLYGSRLGVPDTLGGDPKFRSLTHEDHAIQPQNFMPGPLVNSVSTKEGDSSNTGAGKALTGLSTGTSQNTRISLRPGPVSQPYHHWDTDKYVPGINAISHGQTTYGNAEDKEYQQGVGRFPNEKEQLKQLQGLNMHTYFPNKGTQQYTDQIERPLMVGSVWNRRALHYESQLWSKIPNLDDSFKTQFAALGGWGLHQPPPQIFLKILPQSGPIGGIKSMGITTLVQYAVGIMTVTMTFKLGPRKATGRWNPQPGVYPPHAAGHLPYVLYDPTATDAKQHHRHGYEKPEELWTAKSRVHPL

SEQ ID NO: 825 - protein, 124 aa, Vaccinia virus
MASILNTLRFLEKTSFYNCNDSITKEKIKIKHKGMSFVFYKPKHSTVVKYLSGGGIYHDDLVVLGKVTINDLKMMLFYMDLSYHGVTSSGAIYKLGSSIDRLSLNRTIVTKVNNYDDTFFDDDD

SEQ ID NO: 826 - protein, 107 aa, Human herpesvirus
MAHAKKQARRKLLTSTDDPILSSTFTMRPTSKIADAEIISREHDYIASKTQADSKKKLSSLSVIFDKTVLFEFYGIGDNNEKAIVYPIDPDFLLCDSENNCTLSPFL

SEQ ID NO: 827 - protein, 230 aa, Molluscum contagiosum virus
MQADGAAIYVSLSSLFDASFDFQLTVCHDYCERHALRVLHEERAYGTVREELLRSEAWERIRGLGVAHVVFFQLRQFGTSVAQLYALMQPTTMTLHFVRDCMTFDGGRSAPVFRIVPMDVSTALRARMRDFVALMHMRSCTRAMLRDFVLCNFGAFETLVQTLRRHVLIVTLELAQHEKTARHSLASSKKRKALSMMRFRAFMSKVRALRPLFESSELEDICDAMRCVSL

SEQ ID NO: 828 - protein, 124 aa, Vaccinia virus
MASILNTLRFLEKTSFYNCNDSITKEKIKIKHKGMSFVFYKPKHSTVVKYLSGGGIYHDDLVVLGKVTINDLKMMLFYMDLSYHGVTSSGVIYKLGSSIDRLSLNRTIVTKVNNYDDTFFDDDD

SEQ ID NO: 829 - protein, 222 aa, Human cytomegalovirus
MYAVFGLTRSEVTPHEAAAARYKHRGVIDRQGAAMTSRRAPDGGLNLDDFMRRQRGRHLDLPYPRGYTLFVCDVEETILTPRDVEYWKLLVVTQGQLRVIGTIGLANLFSWDRSVAGVAADGSVLCYEISRENFVVRAADSLPQLLERGLLHSYFEDVERAAQGRLRHGNRSGLRRDADGQVIRESACYVSRVLLRHRVTPGKQEITDAMFEAGNVPSALLP

SEQ ID NO: 830 - protein, 101 aa, Human adenovirus
MTGSTIAPTTDYRNTTATGLTSALNLPQVHAFVNDWASLDMWWFSIALMFVCLIIMWLICCLKRRRARPPIYRPIIVLNPHNEKIHRLDGLKPCSLLLQYD

SEQ ID NO: 831 - protein, 342 aa, Molluscum contagiosum virus
MGNSVQLPAQEPPGPMLTAEMELTLMDMLDVIAQARHGELVHTGALITEEPRFTEIRQLLRSMLPEFDLVETGRGLFGMQRRVFSGELGFCCTHREHHYWEDTRTREHAAAYAPGRALRTCAPWTLTKASPCDQTLFAWCVREDSDTELCKQWLGAAFARHELVPPGASSSLDKLVGLFARRCAQDVRAHGCEDWLHAMRVANEPRFDRVIDAVLAQQDPEFKRTHMACSYPSHRSLELARRVAEPRECWDPQCQRANPNFLLSENYHALAGCHIYRCNVSIGTLLMDKRSKLRISCHDPSTRVQLNKLGVVQDNVRRAPRVRTHLLAALALFLVWVLIVAL

SEQ ID NO: 832 - protein, 571 aa, Human adenovirus
MRRAAMYEEGPPPSYESVVSAAPVAAALGSPFDAPLDPPFVPPRYLRPTGGRNSIRYSELAPLFDTTRVYLVDNKSTDVASLNYQNDHSNFLTTVIQNNDYSPGEASTQTINLDDRSHWGGDLKTILHTNMPNVNEFMFTNKFKARVMVSRLPTKDNQVELKYEWVEFTLPEGNYSETMTIDLMNNAIVEHYLKVGRQNGVLESDIGVKFDTRNFRLGFDPVTGLVMPGVYTNEAFHPDIILLPGCGVDFTHSRLSNLLGIRKRQPFQEGFRITYDDLEGGNIPALLDVDAYQASLKDDTEQGGGGAGGSNSSGSGAEENSNAAAAAMQPVEDMNDHAIRGDTFATRAEEKRAEAEAAAEAAAPAAQPEVEKPQKKPVIKPLTEDSKKRSYNLISNDSTFTQYRSWYLAYNYGDPQTGIRSWTLLCTPDVTCGSEQVYWSLPDMMQDPVTFRSTRQISNFPVVGAELLPVHSKSFYNDQAVYSQLIRQFTSLTHVFNRFPENQILARPPAPTITTVSENVPALTDHGTLPLRNSIGGVQRVTITDARRRTCPYVYKALGIVSPRVLSSRTF

SEQ ID NO: 833 - protein, 426 aa, Vaccinia virus
MTSSADLTNLKELLSLYKSLKFSDSAAIEKYNSLVEWGTSTYWKIGVQKVANVETSISDYYDEVKNKPFNIDPGYYIFLPVYFGSVFIYSKGKNMVELGSGNSFQIPDNMRSACNKVLDSDNGIDFLRFVLLNNRWIMEDAISKYQSPVNIFKLASEYGLNIPKYLEIEIEEDTLFDDELYSIIERSFDDKFPKISISYIKLGELRRQVVDFFKFSFMYIESIKVDRIGDNIFIPSVITKSGKKILVKDVDHLIRSKVREHTFVKVKKKNTFSILYDYDGNGTETRGEVIKRIIDTIGRDYYVNGKYFSKVGSAGLKQLTNKLDINECATVDELVDEINKSGTVKRKIKNQSAFDLSRECLGYPEADFITLVNNMRFKIENCKVVNFNIENTNCLNNPSIETIYGNFNQFVSIFNVVTDVKKRLFE

SEQ ID NO: 834 - protein, 75 aa, Human cytomegalovirus
MSLFYRAVALGTLSALVWYSTSILAEINENSCSSSSVDHEDCEEPDEIVREEQDYRALLAFSLVICGTLLVTCVI

SEQ ID NO: 835 - protein, 268 aa, Molluscum contagiosum virus
MDVYVVRDGAYPRVAARGDATAFVLLGEHVPFVQARLREMRERDERVFLAEYALTPDARTLALRARVVSSSAAVHGRPVSAAQFLHAPHAFRLQTVPRELTRSRDAGTLTVHALCVPEHACVRVTAFVHCPPTPPVPADLRLQGERVRDAAFFYSDARLALQMRGTPGARASAFRNAALRAALGAAVRGAAPAPLRELLEALLPPLRAARWLALLPAHDADAARLARFCYERERFRAFVFAWFCGQLSAQRAENEKISRAYESVARAL

SEQ ID NO: 836 - protein, 270 aa, Variola virus
MNCFQEKQFLRENLLKMPFRMVLTGGSGSGKTIYLLSLFSTLVKKYKHIFLFTPVYNPDYDGYIWPNHINFVSSQESLEYNLIRTKSNIEKCITVAQNHKKSAHFLLIFDDVGDKLSKCNTLIEFLNFGRHLNTSIILLCQTYRHVPILGRANITHFCSFNISISDAENMLRSMPVKGKRKDILNMLNMIQTVRSNNRLAIIIEDSVFCEGELRICTDTADKDVIEQKLNIDILVNQYSHMKKNLNTILESTKTKLCNSDQSSSSKNVSS

SEQ ID NO: 837 - protein, 127 aa, Human cytomegalovirus
MTSVNKQLLKDVMRVDLERQQHQFLRRTYGPQHRLTTQQALTVMRVAAREQTRYSQRTTQCVAAHLLEQRAAVQQELQRARQLQSGNVDDALDSLTELKDTVDDVRATLVDSVSATCDLDLEVDDAV

SEQ ID NO: 838 - protein, 488 aa, Human herpesvirus
MDLNQISETLSAVAEEEPLTMFLLDKLYAIREKIKQVPFSIVRLCHVYCMLIKYNASNNNCILGRKLIEEMQQFLCGARVDGSEDVSMDMSELCKLYDYCPLLCSALCRAPCVFVNKLFKIVERETRGQSENPLWHALRRYTVTATKLYDIYTTRNFLEHKGQQFFGEAVIYGAKHERVIRHLVAIFYVKREVKETLGLLLDPSSGVFGASLDACFGISFNEDGFLMVKEKALIFEIKFRYKYLRDKEDHFVSELLKNPTEKSFSDFILSHPVPAIEFRERGKIPSSREYLMTYDFQYRPQRKLRTCPTPAILTPHIKQLLCLNETQTSTVIVFDCKSHLSEQKLSVFQKAVFTVNVFVNPKHRYFFQSLLQQYVMTQFYINDHSNPEYIESTEVPSVHIVTALFRRRTEEERSLHLVIDETEYIEEEIPLALIVTPVAPNPEFTCRVITDICNLWENNICKQTSLQVWAQSAVNQYLAACVRKPKTP

SEQ ID NO: 839 - protein, 178 aa, Molluscum contagiosum virus
MAEKKLSRSSYDDYIETINKITPQLKTLLAHISSEQAQAAPVGGARARSSPRSGTRCYTSTGRPRSCATGARRRAYTAAQPEQVQAVTNCGKIVYGTMRDGKMEVQGTVGEVSHDLLGLESVNAGRRTRTRSSSPRPRAPRSGTRRSTGTRSSGARSRGSPRRRATGDSPSMPDYGMD

SEQ ID NO: 840 - protein, 151 aa, Vaccinia virus
MNAYNKADSFSLESDSIKDVIHDYICWLSMTDEMRPSIGNVFKAMETFKIDAVRYYDGNIYDLAKDINAMSFDSFIRSLQNISSKKDKLTVYGTMGLLSIVVDINKGCDISNIKFAAGIIILMEYIFDDTDMSHLKVALYRRIQRRDDVDR

SEQ ID NO: 841 - protein, 277 aa, Vaccinia virus
MSRVRISLIYLYTLVVITTTKTIEYTACNDTIIIPCTIDNPTKYIRWKLDNHDILTYNKTSKTTILSKWHTSARLHSLSDSDVSLIMEYKDILPGTYTCGDNTGIKSTVKLVQLHTNWFNDYQTMLMFIFTGITLFLLFLEITYTSISVVFSTNLGILQVFGCVIAMIELCGAFLFYPSMFTLRHIIGLLMMTLPSIFLIITKVFSFWLLCKLSCAVHLIIYYQLAGYILTVLGLGLSLKECVDGTLLLSGLGTIMVSEHFSLLFLVCFPSTQRDYY

SEQ ID NO: 842 - protein, 110 aa, Human herpesvirus
MDVWKRQRLQECRELCPLPVLMSLSNMFSKIEIVYVKYLFKMDFSTMYRYILPALTLSMTVTKSLVIEMLFILKRWEDIDQFFRLNIRKVNDCFIVAQFNHIPIKRWVLI

SEQ ID NO: 843 - protein, 111 aa, Molluscum contagiosum virus
MDLKTLVITHEDYGTKAVSVDGASSALDLRERVKVAFQVLGEIELFVHPCPLRSRVLDSDALPVEEPAHAAFFVALGAPRAPGMLRTLVVGAPGARSAQKARGSRGARCQL

SEQ ID NO: 844 - protein, 378 aa, Vaccinia virus
MGAAVTLNRIKIAPGIADIRDKYMELGFNYPEYNRAVKFAEESYTYYYETSPGEIKPKFCLIDGMSIDHCSSFIVPEFAKQYVLIHGEPCSSFKFRPGSLIYYQNEVTPEYIKDLKHATDYIASGQRCHFIKKDYLLGDSDSVAKCCSKTNTKHCPKIFNNNYKTEHCDDFMTGFCRNDPGNPNCLEWLRAKRKPAMSTYSDICSKHMDARYCSEFIRIIRPDYFTFGDTALYVFCNDHKGNRNCWCANYPKSNSGDKYLGPRVCWLHECTDESRDRKWLYYNQDVQRTRCKYVGCTINVNSLALKNSQAELTSNCTRTTSAVGDVHHPGEPVVKDKIKLPTWLGAAITLVVISVIFYFISIYSRPKIKTNDINVRRR

SEQ ID NO: 845 - protein, 608 aa, Human cytomegalovirus
MNPVDQPPPPPLTQQPEEQAKEDHDDGDERLFRDPLTTYEYLDDCRDDEEFCHQFLRAYLTPIRNRQEAVRAGLLCRTPEDLAAAGGQKRKTPAPKHPKHAMVYIRRSCLVHSACATAHGKYDIRGLTLESDLAVWAALRGVPLPPDPQHFRWLNAGAFRRLVHEAQYLPEISRAAKRIALAVATGQYVVCTLLDYKTFGTRTHYLRQLCSMTEELYLRLDGTLCLFLEPEERELIGRCLPAALCRGLPVKYRTHRAAVFFHATFMARAEAALKDLYAAFCECGDGRDDGGNHNGNYGGGDHSSLSPSAVASHHSRLEHAELRLERNRHLGAFHLPAIRHLTAGDVARVQDSVSRDLGFADWSQTLVDDYFLLPAGWACANPRRGYAMYLASNAVLALRIIRLLRASIRHEYTACIRMLSGDVQRLIRLFKGEAALLRKGLAQNPVQRRELSRFRKHVHDLKRIRFTEDTFVETFCDFLELVQRIPDYRSVSLRIKRELLCLHVFKLRRGCRAPPTPEAVRVQRLLWHSLRHGDAPQDRTRLPQFSSALSDAELSNHANRCRRKAPLELGPAVVAAPGPSVRYRAHIQKFERLHVRRFRPHEVGGHAT

SEQ ID NO: 846 - protein, 486 aa, Human herpesvirus
MEATPTPADLFSEDYLVDTLDGLTVDDQQAVLASLSFSKFLKHAKVRDWCAQAKIQPSMPALRMAYNYFLFSKVGEFIGSEDVCNFFVDRVFGGVRLLDVASVYAACSQMNAHQRHHICCLVERATSSQSLNPVWDALRDGIISSSKFHWAVKQQNTSKKIFSPWPITNNHFVAGPLAFGLRCEEVVKTLLATLLHPDEANCLDYGFMQSPQNGIFGVSLDFAANVKTDTEGRLQFDPNCKVYEIKCRFKYTFAKMECDPIYAAYQRLYEAPGKLALKDFFYSISKPAVEYVGLGKLPSESDYLVAYDQEWEACPRKKRKLTPLHNLIRECILHNSTTESDVYVLTDPQDTRGQISIKARFKANLFVNVRHSYFYQVLLQSSIVEEYIGLDSGIPRLGSPKYYIATGFFRKRGYQDPVNCTIGGDALDPHVEIPTLLIVTPVYFPRGAKHRLLHQAANFWSRSAKDTFPYIKWDFSYLSANVPHSP

SEQ ID NO: 847 - protein, 139 aa, Molluscum contagiosum virus
MNSANHFLPRAPAARSGASPAHCHAELAKARLPRGHVLGGAQSNCGLASTLASRGLVLSCVVNVRGVHMPVHLPVNAPPTTHPRGLAPFLEGHAHIFEVAVASLAGTPCACGGACCGCCLLNPVVASDVLKKCTFARLA

SEQ ID NO: 848 - protein, 304 aa, Vaccinia virus
MPQQLSPINIETKKAISNARLKPLDIHYNESKPTTIQNTGKLVRINFKGGYISGGFLPNEYVLSSLHIYWGKEDDYGSNHLIDVYKYSGEINLVHWNKKKYSSYEEAKKHDDGLIIISIFLQVSDHKNVYFQKIVNQLDSIRSANTSAPFDSVFYLDNLLPSTLDYFTYLGTTIKHSADAVWIIFPTPINIHSDQLSKFRTLLSSSNHDGKPYYITENYRNPYKLNDDTQVYYSGEIIRAATTSPARENYFMRWLSDLRETCFSYYQKYIEGNKTFAIIAIVFVFILTAILFLMSRRYSREKQN

SEQ ID NO: 849 - protein, 124 aa, Vaccinia virus
MKNVLIIFGKPYCSICENVSDAVEELKSEYDILHVDILSFFLKDGDSSMLGDVKRGTLIGNFAAHLSNYIVSIFKYNPQTKQMAFVDINKSLDFTKTDKSLVNLEILKSEIEKANYGVWPPVTE

SEQ ID NO: 850 - protein, 337 aa, Human herpesvirus
MFPFVPLSLYVAKKLFRARGFRFCQKPGVLALAPEVDPCSIQHEVTGAETPHEELQYLRQLREILCRGSDRLDRTGIGTLSLFGMQARYSLRDHFPLLTTKRVFWRGVVQELLWFLKGSTDSRELSRTGVKIWDKNGSREFLAGRGLAHRREGDLGPVYGFQWRHFGAAYVDADADYTGQGFDQLSYIVDLIKNNPHDRRIIMCAWNPADLSLMALPPCHLLCQFYVADGELSCQLYQRSGDMGLGVPFNIASYSLLTYMLAHVTGLRPGEFIHTLGDAHIYKTHIEPLRLQLTRTPRPFPRLEILRSVSSMEEFTPDDFRLVDYCPHPTIRMEMAV

SEQ ID NO: 851 - protein, 675 aa, Molluscum contagiosum virus
METKAGPDSVFLCSRLNLGAHYRNQLLSLVDRAHLHEPAPSILCSICDTLAKVLPEDAGVSAGARQQRPVRRVPAAPRARVSPRRVAGARGEDACKPSSEAGDVPMIPIDEVASTQDWHLRLRRDGDAIVRYLVENKCDLASFTIQDMIGIMRKLNIVRSDRQELFELLGHVKGSLSNSSVSVKTTHPLVLIYSHADPHIGEQLRALERVYSPSRYQTLLATTRFQSGHFVDMSSSQDLVFKYRENDSTCFVHPILVALFGVKLPALENAFVYGDSYSLLRQLYELKKVRPDNYMLLINRLTEDAPILFTGVNDVVSTEVQRANVHTMIRKLILNIRLGIFYCCDSEAVDPYLMKIIHTSSSQMMADEEQLLASVLAIVGFRPALVSVVRAGAAPGFDVNLQSVPYIVVNPARMITTMDNPVAINSSSVYSLTFDGATGRVLFSPPHMSYQGQLGCRGVDALPILHGNNMPVLERPMNAPVIVNGTLIYYVERRQNKNIIGGESYAGFRSLINDRPMDVANDITINGILYRLRSAVCYKVGDQLIDGCEPAGDIFLKGYYTIVFTELGPWLYDPLSVFSKPAREARLLRALKNHYARENAGEDEALFYDWLKQESTQPVLMAKQQQLMNHRAMFDDDLLPMEEAMSLVSRHCCVLVYAQDYEPYIAAKNITEIFC

SEQ ID NO: 852 - protein, 203 aa, Vaccinia virus; identical to SEQ ID NO: 772

SEQ ID NO: 853 - protein, 423 aa, Human cytomegalovirus
MEKTPAETTAVSAGNVPRDSIPCITNVSADTRGRTRPSRPATVPQRRPARIGHFRRRSASLSFLDWPDDSVTEGVRTTSASVAASAARFDEIRRRRQSINDEMKERTLEDALAVELVNETFRCSVTSDARKDLQKLVRRVSGTVLRLSWPNGWFFTYCDLLRVGYFGHLNIKGLEKTFLCCDKFLLPVGTVSRCEAIGRPPLPVLIGEGGRVYVYSPVVESLYLVSRSGFRGFVQEGLRNYAPLREELGYVRFETGGDVGREFMLARDLLALWRLCMKREGSIFSWRDGNEALTTVVLNGSQTYEDPAHGNWLKETCSLNVLQVFVVRAVPVESQQRLDISILVNESGAVFGVHPDTRQAHFLARGLLGFFRVGFLRFCNNYCFARDCFTHPESVAPAYRATGCPRELFCRRLRKKKGLFARR

SEQ ID NO: 854 - protein, 470 aa, Epstein-Barr virus
MADVDELEDPMEEMTSYTFARFLRSPETEAFVRNLDRPPQMPAMRYVYLYCLCEQIQEFSGETGFCDFVSSLVQENDSQDGPSLKSIYWGLQEATDEQRTVLCSYVESMTRGQSENLMWDILRNGIISSSKLLSTIKNGPTKVFEPAPISTNHYFGGPVAFGLRCEDTVKDIVCKLICGDASANRQFGFMISPTDGIFGVSLDLCVNVESQGDFILFTDRSCIYEIKCRFKYLFSKSEFDPIYPSYTALYKRPCKRSFIRFINSIARPTVEYVPDGRLPSEGDYLLTQDEAWNLKDVRKRKLGPGHDLVADSLAANRGVESMLYVMTDPSENAGRIGIKDRVPVNIFINPRHNYFYQVLLQYKIVGDYVRHSGGGKPGRDCSPRVNIVTAFFRKRSPLDPATCTLGSDLLLDASVEIPVAVLVTPVVLPDSVIRKTLSTAAGSWKAYADNTFDTAPWVPSGLFADDESTP

SEQ ID NO: 855 - protein, 343 aa, Molluscum contagiosum virus
MEAQAMERPLLYFHELTQTQEYDAEVERAARSRFPAQGQLKLLIGELFFLNKLHRREMLAGTTVVYIGSAPGGHIRYLVEHFRALGVPLRWMLLDGRSHDSRLQGLSDVTLVTRFVDERYLMRMRQALRGARVVLISDIRSRRGSEPSTEDLLYDYALQNSMLSILKPVASSLKWRCPFPDQWLHNFYVVCGKELLQPFAPPFSAELRLLSVHAGAPRLRCITLAAARDYEKKMFYLNNVIRRRIVLNFDYPNQEYDFFHMFHLLNTVLCPRSFDSPTKKVLFLQQSIFRFLGIQSPLPEKLPLPERPRKHEPAQRGVPGQDPVSEGRGRAKPVRGRQQGAPE

SEQ ID NO: 856 - protein, 585 aa, Human adenovirus
MMQDATDPAVRAALQSQPSGLNSTDDWRQVMDRIMSLTARNPDAFRQQPQANRLSAILEAVVPARANPTHEKVLAIVNALAENRAIRPDEAGLVYDALLQRVARYNSGNVQTNLDRLVGDVREAVAQRERAQQQGNLGSMVALNAFLSTQPANVPRGQEDYTNFVSALRLMVTETPQSEVYQSGPDYFFQTSRQGLQTVNLSQAFKNLQGLWGVRAPTGDRATVSSLLTPNSRLLLLLIAPFTDSGSVSRDTYLGHLLTLYREAIGQAHVDEHTFQEITSVSRALGQEDTGSLEATLNYLLTNRRQKIPSLHSLNSEEERILRYVQQSVSLNLMRDGVTPSVALDMTARNMEPGMYASNRPFINRLMDYLHRAAAVNPEYFTNAILNPHWLPPPGFYTGGFEVPEGNDGFLWDDIDDSVFSPQPQTLLELQQREQAEAALRKESFRRPSSLSDLGAAAPRSDASSPFPSLIGSFTSTRTTRPRLLGEEEYLNNSLLQPQREKNLPPAFPNNGIESLVDKMSRWKTYAQEHRDVPGPRPPTRRQRHDRQRGLVWEDDDSADDSSVLDLGGSGNPFAHLRPRLGRMF

SEQ ID NO: 857 - protein, 79 aa, Vaccinia virus
MVDAITVLTAIGITVLMLLMVISGAALIVKELNPNDIFTMQSLKFNRAVTIFKYIGLFIYIPGTIILYATYVKSLLMKS

SEQ ID NO: 858 - protein, 434 aa, Human herpesvirus
MITVFVACLFQCVSSLPAKLYIKTTLAEGIGKLQTVIGIDNDIVFAYERLYGDLTLRNHTAVGETLFDLAGSLEEGKNSTVDRFLGHVVIREFHRLHAGLQYVSVQNFSVSELVCFVNNNTQLSGSYVFLARNTTYVQIDLFNENRSFVHDLINVSSFLQNRSLHVLSFYARRFCVEDILNFYGKVVFGDSKYRPPQVFSKRDTGLLVCTARRYRPIGTNIQWSLHNQTVSDDHTTDDFIRTEISGQLLYSYERALSRALSMTHREFSCEITHKLLVTPALLTREDAFSFKGFVNPVKESEDTFPRHNFPAPHRKKFNKLQLLWIFIVIPIAAGCMFLYILTRYIQFFVSGGSSSNPNRVLKRRRGNDEVPMVIMEVEYCNYEAENHDMELHSVQNVRDDSIAVVCGNNSFDIERQSIKSHESFSNVKLEMLPL

SEQ ID NO: 859 - protein, 148 aa, Molluscum contagiosum virus
MNVTRLEQVIGLQPFHDMDRVKINRKENCILGNRCFVKLAEVFHMPRCSVPTSASLCANNHSFTLHELLYSPFHYKQPQYQYLLPSFVFTCIELARKNNQTCYYCKADRANEEGSLNLNIFVPTLARSMYVVIGIRIKDYWVEAFEIV

SEQ ID NO: 860 - protein, 493 aa, Variola virus
MSLLKMEYNLYAELKKITCGQSLSLFNEDGDFVEVEPGSLFKFLIPKGFYSSPSVKTSLVFETLTTTDNKITSINPTNAPKLYPLQHKVVSEVVSNMRKMIKLKRPLYITLHLACGFGKTITTCYLMATHGRKTVICVPNKMLIHQWKTQVEAVGLEHKISIDGVSSLLKELKTQSPDVLIVVSRHLTNDAFCKYINKHYDLFILDESHTYNLMNNTAVTRFLAYYPPMMCYFLTATPRPSNRIYCNSIINIAKLSDLKKTIYAVDSFFEPYSTDNIRHMIKRLDGPSNKYHIYTEKLLSVDEPRNQLILNTLVEEFKSGTINRVLVITKLREHMVLFYKRLLDLFGPEVVFIGDAQNRRTPDMVKSIKELNRFIFVSTLFYSGTGLDIPSLDSLFICSAVINNMQIEQLLGRVCRETELLDRTVYVFPNTSVKEIKYMIGNFVQRIISLSVDKLGFKQESYRKHQESDPTSVCTASSREERVLNRIFNSQNR

SEQ ID NO: 861 - protein, 570 aa, Human cytomegalovirus
MASRRLRHAPHTATDEFHQALRRLFAPLCVHEDHFHVQLVIGRGALQPEEAAVETSQPPAQFAAQTSAVLQQQLVHHVPRSCVLHLFVTDKRFLNRELGDRLYQRFLREWLVCRQAEREAVTALFQRMVMTKPYFVFLAYVYSMDCLHTVAVRTMAFLRFERYDTDYLLRRLRLYPPERLHALLDGVTASLLGDLHRFLFGVDLRLPVLHPTSSPCLALLRAKRFDARADLAVYHRNQWCHQRQPRSPQLRGLIAALRRYAGKVPCGNPLYVLARQAVQTFCDTCPRYLVPLRALGLHDETRGGGSTAAAAAVGHAGAGQQARHVEPTKIVLFALSAALRGGLIGSVIDLPLWCLCRLKCERHLDARSLVAVVCRQCGHCLNLGKEKLHCQQNFPLNSMFYYRDRQEKSVIFNTHAELVHCSLCGSQRVVRQRVYELVSETLFGQRCVRVGWKAVLGLNAACAVYDHRLAFDVILPCAARTCDSTVVVRDVTVPRLLRLTSHGHGLLCARCQTGEYRDSCLESEDGAPLCRGCALVKQTACHVGGHIVQQARGGLAAASSSSSPHGLPHV

SEQ ID NO: 862 - protein, 584 aa, Human cytomegalovirus
MWGVSSLDYDDDEELTRLLAVWDDEPLSLFLMNTFLLHQEGFRNLPFTVLRLSYAYRIFAKMLRAHGTPVAEDFMTRVAALARDEGLRDILGQRHAAEASRAEIAEALERVAERCDDRHGGSDDYVWLSRLLDLAPNYRQVELFQLLEKESRGQSRNSVWHLLRMDTVSATKFYEAFVSGCLPGAAAADGSGGGGSHYTGSRAGVSPGIQFGIKHEGLVKTLVECYVMHGREPVRDGLGLLIDPTSGLLGASMDLCFGVLKQGSGRTLLVEPCARVYEIKCRYKYLRKKEDPFVQNVLRRHDAAAVASLLQSHPVPGVEFRGERETPSAREFLLSHDAALFRATLKRARPLKPPEPLREYLADLLYLNKAECSEVIVFDAKHLSDDNSDGDATITINASLGLAAGDAAGGGADHHLRGSPGDSPPPIPFEDENTPELLGRLNVYEVARFSLPAFVNPRHQYYFQMLIQQYVLSQYYIKKHPDPERIDFRDLPTVYLVSAIFREREESELGCELLAGGRVFHCDHIPLLLIVTPVVFDPQFTRHAVSTVLDRWSRDLSRKTNLPIWVPNSANEYVVSSVPRPVSP

SEQ ID NO: 863 - protein, 761 aa, Cercopithecine herpesvirus
MGDAGLVWAEESICAITLYTAWLPPRTRDRLHVLLYLFCRDARGDGAARFAEVSIASTELQAFYGPAEISAAGAVAAARAAASPAAAPLETLNDPVLWRALYACALVALEREVGRAALFAPARVAWDPRTGLVARIEGLPDGRSPAPRAAALDVNAQIATDPLALAAHVAARPDARLAWARLAAIQDTPQCASAASLTVRIDTGAARFAREYTTLTFPPVRREGAVADVFEVREAVLRPRGHAQAVTARVLVPRGYEYFAVGAEGFSAPALIAMFRQWYLTVHAGPGALPPIFAFLGPEFEPRGGAVDHFSVLGFPGWATLKVSGGAAAAPPAALAAHAELAGAWPAAGARALGPARAWAAVSAAAAERLPPALRRPAAAGLRLLDPPAVIGPVCLARFRFPGLQPRLLAALYELGLRGDPRAADPRDPLGRGARRWRDLAGGEGAAEQAPWPREVLALATDEVRREYPAVARTLDGIVSAVGVGLEKAAGAVDMAVCGDGGGRVWGVLNVDPRDAAGAGAAAAAAERARAALAASASEALAGWGLRLDAPPPLVLEGTYTHAVLWSQTGAWFWNSDTDEDRLEGFPLRGPAYAAAAAVARRALRAVVAAGSEGGAGAEEALRIAHDACDRLVMEAFERRLDAEYWGVAETPSDRGDPLPTAAFRGGALLDAERYERRVVRVCGGPDGGSVSVPIDLYPRPLVLPPIDCAHHLREVLAEMEAVFRGALTGLWGEGCGFAYPFEERSLFMFDPNGAAGVNNK

SEQ ID NO: 864 - protein, 582 aa, Human adenovirus
MQRPAIIAERAPNLDPAVLAAMQSQPSGVTASDDWTAAMDRIMALTARSPDAFRQQPQANRFSAILEAVVPSRTNPTHEKVLTIVNALLDSKAIRKDEAGLIYNALLERVARYNSTNVQANLDRMGTDVKEALAQRERFHRDGNLGSLVALNAFLSTQPANVPRGQEDYTNFISALRLMVTEVPQSEVYQSGPDYFFQTSRQGLQTVNLTQAFKNLQGLWGVRAPVGDRSTLSSLLTPNSRLLLLLIAPFTNTNSLSRDSYLGHLVTLYREAIGQAQVDEQTYQEITSVSRALGQEDTGSLEATLNFLLTNRRQQVPPQYTLNAEEERILRYVQQSVSLYLMREGATPSAALDMTARNMEPSFYASNRAFINRLMDYLHRAAAMNGEYFTNAILNPHWLPPPGFYTGEFDLPEGNDGFLWDDVTDSLFSPAVIGHHGKKEAGDEGPLLDSRASSPFPSLTSLPASVNSGRTTRPRLTGESEYLNDPILFPVRDKNFPNNGIESLVDKMSRWKTYAQERREWEERQPRPVRPPRQRWQRRKKGAHAGDEGSDDSADDSSVLDLGGSGNPFAHLRPQGCIGSLY

SEQ ID NO: 865 - protein, 220 aa, Vaccinia virus
MPFRDLILFNLSKFLLTEDEESLEIVSSLCRGFEISYDDLITYFPDRKYHKYIYKVFEHVDLSEELSMEFHDTTLRDLVYLRLYKYSKCIRPCYKLGDNLKGIVVIKDRNIYIREANDDLIEYLLKEYTPQIYTYSNERVPIAGSKLILCGFSQVTFMAYTTSHITTNKKVDVLVSKKCIDELVDPINYQILQNLFDKGSGTINKILRKIFYSVTGGQTP

SEQ ID NO: 866 - protein, 236 aa, Human herpesvirus
MLFLSFLLVCLCEEVRMLNLMTTEVSATEFASIASKNMETDVSTSSDYLTGKSETTFSANSETWGKNVTEISIDSETYLNQSFMVTSTLAVETTDRSIGNNVNVTSSFPTVKGDETQNIETSFTVISASTFSDVSEKTPQGLSTKSTPKKTVQALWETDTVQVLEFTDTHEGDEEYFKDFLSSLVIWIGGISFIGAFVILIVILCNWYKKDKQRSLFWDEEKKPDVQMRRDVKTCR

SEQ ID NO: 867 - protein, 67 aa, Molluscum contagiosum virus
MHARAWLCVWLFVFCVAMFWRPARPPRPGAREFRRARASSAERRAARELEALRAAVAERRAELAALG

SEQ ID NO: 868 - protein, 176 aa, Vaccinia virus
MDAAFVITPMGVLTITDTLYDDLDISIMDFIGPYIIGNIKTVQIDVRDIKYSDMQKCYFSYKGKIVPQDSNDLARFNIYSICAAYRSKNTIIIACDYDIMLDIEDKHQPFYLFPSIDVFNATIIEAYNLYTAGDYHLIINPSDNLKMKLSFNSSFCISDGNGWIIIDGKCNSNFLS

SEQ ID NO: 869 - protein, 570 aa, Human cytomegalovirus
MANRRLRHAPHTATDEFHQALRRLFAPLCVHEDHFHVQLVIGRGALQPEEAAVETSQPPAQFAAQTSAVLQQQLVHHVPRSCVLHLFVTDKRFLNRELGDRLYQRFLREWLVCRQAEREAVTALFQRMVMTKPYFVFLAYVYSMDCLHTVAVRTMAFLRFERYDTDYLLRRLRLYPPERLHALLDGVTVSLLGDLHRFLFGVDLRLPVLHPTSSPCLALLRAKRFDARADLAVYHRNQWCHQRQPRSPQLRGLIAALRRHAGKVPCGNPLYVLARQAVQTFCDTCPRYLVPLRALGLHDETRGGGSTAAAAAVGHAGAGQQAHHVEPTKIVLFALSAALRGGLIGSVIDLPLWCLCRLKCERHLDARSLVAVVCRQCGHCLNLGKEKLHCQQNFPLNSMFYYRDRQEKSVIFNTHAELVHCSLCGSQRVVRQRVYELVSETLFGQRCVRVGWKAVLGLNAACAVYDHRLAFDVILPCAARTCDSTVVVRGVTVPRLLRLTSHGHGLLCARCQTGEYRDSCLESEDGAPLCRGCALVKQTACHVGGHIVQQARGGLAATSSSSSPHGLPHV

SEQ ID NO: 870 - protein, 626 aa, Human herpesvirus
MESTVGPACPPGRTVTKRPWALAEDTPRGPDSPPKRPRPNSLPLTTTFRPLPPPPQTTSAVDPSSHSPVNPPRDQHATDTADEKPRAASPALSDASGPPTPDIPLSPGGTHARDPDADPDSPDLDSMWSASVIPNALPSHILAETFERHLRGLLRGVRAPLAIGPLWARLDYLCSLAVVLEEAGMVDRGLGRHLWRLTRRGPPAAADAVAPRPLMGFYEAATQNQADCQLWALLRRGLTTASTLRWGPQGPCFSPQWLKHNASLRPDVQSSAVMFGRVNEPTARSLLFRYCVGRADDGGEAGADTRRFIFHEPSDLAEENVHTCGVLMDGHTGMVGASLDILVCPRDIHGYLAPVPKTPLAFYEVKCRAKYAFDPMDPSDPTASAYEDLMAHRSPEAFRAFIRSIPKPSVRYFAPGRVPGPEEALVTQDQAWSEAHASGEKRRCSAADRALVELNSGVVSEVLLFGAPDLGRHTISPVSWSSGDLVRREPVFANPRHPNFKQILVQGYVLDSHFPDCPPHPHLVTFIGRHRTSAEEGVTFRLEDGAGALGAAGPSKASILPNQAVPIALIITPVRIDPEIYKAIQRSSRLAFDDTLAELWASRSPGPGPAAAETTSSSPTTGRSSR

SEQ ID NO: 871 - protein, 435 aa, Molluscum contagiosum virus
MFQRVPDLEVDAVLELGDFCIQDTRGAPRESAHYVARHRRLFVNRSKDDERKLALGFFLPRLPFLTGREIHHLFQCVDTVKHVHITKKNNVIVAPYVILITMAARGYRLTETLLEMFFPELHKESSKKFRFATQIQIIQEKLGYAPGGYYVYEFECYYATVGLLLQSYHGERDPGELFDARRVSSLVKALAEITYRLYCIHLRSQSVQWSISASTLINQIVNTVLLTLQTLQARALACGEVLTCTLARDSGFPSQQFAHYADALALLVADMRRVQSCKANRHDQQVLLSFCRVGGREPALAPEARAAPVSVSASMFAARDLRARQRTRTRARAQRARLADANVPPAGRPGAALPAGTPGVLASPSALAPRDGAPRAPTWQGQRTAAVARADEPPAIALPVLAPPASEHPQTLPALAAPNTLSGKEACKCRAKRRA

SEQ ID NO: 872 - protein, 265 aa, Human adenovirus
MEDINFSSLAPRHGTRPYMGTWNEIGTSQLNGGAFNWNSIWSGLKNFGSTIKTYGTKAWNSQTGQMLRDKLKDQNFQQKVVDGLASGINGVVDIANQAVQKKIANRLEPRPDEVMVEEKLPPLETVPGSVPTKGEKRPRPDAEETLVTHTTEPPSYEEAIKQGAALSPTTYPMTKPILPMATRVYGKNENVPMTLELPPLPEPTIADPVGSVPVASVPVASTVSRPAVRPVAVASLRNPRSSNWQSTLNSIVGLGVKSLKRRRCY

SEQ ID NO: 873 - protein, 221 aa, Vaccinia virus
MMLVPLITVTVVAGTILVCYILYICRKKIRTVYNDNKIIMTKLKKIKSSNSSKSSKSTDSESDWEDHCSAMEQNNDVDNISRNEILDDDSFAGSLIWDNESNVMAPSTEHIYDSVAGSTLLINNDRNEQTIYQNTTVVINETETVKVLNEDTKQNPNYSSNPFVNYNKTSICSKSNPFITELNNKFSENNPFRRAHSDDYLNKQEQDHEHDDIESSVVSLV

SEQ ID NO: 874 - protein, 299 aa, Human herpesvirus
MRKSEFNAKSCFLMIGICVFNLNSSSCIIKTNAEHCSKRLFSFCYLGVGVIKKPLHLGNRKNMLFLSFLLVCLCEEVQMLNLTTTEVSATEFASIASKNMETNVSTSSDYLTGKSETTFSANPETWGKNVTEISIASVAYLNQSSMVTSTLAVGTTNRSSGNNVNVTTSSFPTVKGDEAQDIETFFTVILASTLSDVSEKTPQGLPTKSTPKKTVQALWETDTVQVPELTDTNEGDEEYFKDFLSSLVIWICGISFVGAFIIVIVILYNWYKKDKQRSLLWDEENKPDVQIRRDAKTCR

SEQ ID NO: 875 - protein, 361 aa, Molluscum contagiosum virus
MSTALGENGKDGEASSPCSSTPASTPASTPAGTPTMTAPAFYYSIDGERSTYGGYAPAAYYAPTQLMPAPYTGAPSHAPAPAHAPAPAHAPAHSAAVTSLSVQSAALPTNAHAHIDWVSCVNVVMQRMHQSSNFFPEIDVHGTNGRFLCTMVHETVRLTSGIHCSVKAAKNEVCHLLMNRLTGVPNSSHQECPCSMAETQAYYEKLHHKKQDHVRSVQAVSHSANLIERKYFSTRGFGRGHGSGPCGSGRLQCGPSAFPERFPPPSGDHSHLKTRRGAPRGTPRGSWRGAAPGGAPGGAPGGAACGLTPIPDGINPPCLNGTTMRARGGRGRRARGVACPGPNSSMPRMLLRPVSVPVSSE

SEQ ID NO: 876 - protein, 219 aa, Vaccinia virus
MYSLLFIILMCIPFSFQTVYDDKSVCDSDNKEYMGIEVYVEATLDEPLRQTTCESEIHKYGASVSNGGLNISVDLLNCFLNFHTVGVYTNRDTVYAKFASLDPWTTEPINSMTHDDLVKLTEECIVDIYLKCEVDKTKDFMKTNGNRLKPRDFKTVPPSDVGSMIELQSDYCVNDVTAYVKIYDECGNIKQHSIPTLRDYFTTKNGQPRKILKKKFDNC

SEQ ID NO: 877 - protein, 105 aa, Human cytomegalovirus
MYLQANRDDNFFAERTSGCITRLASDSLCLFHSSFIHIQTSCDTRIILRGKTLLLSSHWVPYPLRIPHYPPSWSRTIPNRIRYIPATQGDVYHGRRLGRDPYSRR

SEQ ID NO: 878 - protein, 274 aa, Human SARS coronavirus
MDLFMRFFTLGSITAQPVKIDNASPASTVHATATIPLQASLPFGWLVIGVAFLAVFQSATKIIALNKRWQLALYKGFQFICNLLLLFVTIYSHLLLVAAGMEAQFLYLYALIYFLQCINACRIIMRCWLCWKCKSKNPLLYDANYFVCWHTHNYDYCIPYNSVTDTIVVTEGDGISTPKLKEDYQIGGYSEDRHSGVKDYVVVHGYFTEVYYQLESTQITTDTGIENATFFIFNKLVKDPPNVQIHTIDGSSGVANPAMDPIYDEPTTTTSVPL

SEQ ID NO: 879 - protein, 484 aa, Cercopithecine herpesvirus
MGLFGMMKFAHTHHLIKRRALRAPAGCFTPIAVDLWNVMYTLVLKYQRRYPTYDREAMTLRCLCSLLRVFAQKGLYPIFVTDRGVDCTEAAVFGAKAILTHTTTQCRTDEEASDMDSSPPGSPISDARPSTAFSNMRRRGYSADAGSRPQAPAAGSAAKPALKLAHRFCIRLLRALGYAYINSGRMEADDACANLYHTNTVAYVHTTDTDLLLMGCDIVLDISPCYIPTIHCRDLLSYFKMSYPQFLALFVRCHTDLHPNNTQASVDDVLRECGWTPPGRARADHGGEGTARPWRPPSPPVFETRISWTDVLSRQLSEADGDCADDDEASLEPVEPLPEPRGRAPAKARSSSEILTPPELVTVPEAQLVEEHRDYVRRRRRHVLHDAAEAVDWLPEPMTITELVELRYVKYVISIIAPKRRGPWVLLKRLPIYQDARDEDLARSLVNQHITTPDIAAGFLHQLWTTVPSPPPPYQTVLAKFWDE

SEQ ID NO: 880 - protein, 140 aa, Human adenovirus
MSTNSFDGSIVSSYLTTRMPPWAGVRQNVMGSSIDGRPVLPANSTTLTYETVSGTPLETAASAAASAAAATARGIVTDFAFLSPLASSAASRSSARDDKLTALLAQLDSLTRELNVVSQQLLDLRQQVSALKASSPPNAV

SEQ ID NO: 881 - protein, 133 aa, Vaccinia virus
MTDEQIYAFCDANKDDIRCKCIYPDKSIVRIGIDTRLPYYCWYEPCKRSDALLPASLKKNITKCNVSDCTISLGNVSITDSKLDVNNVCDSKRVATENIAVRYLNQEIRYPIIDIKWLPIGLLALAILILAFF

SEQ ID NO: 882 - protein, 57 aa, Human herpesvirus
MLLISKTLFPIPRSAEELWEGTYTLVVAFVLAFLVYSDYLSNLSPFGEILSSPCIST

SEQ ID NO: 883 - protein, 268 aa, Molluscum contagiosum virus
MSRVARRKSKYQPLRRQRRAPCLAVPGAGSASEDDAEPEPGPEPEPGPVPEPAARSSPRAAARLPGAGGLPRRASASLPADVVARALPPAPAPQTLSLREQLLRFAARASYAPAHELAHALGALSLPDLYRVANVSPEREYDFFLREPVLAPALYSREHRFHHRNSVRLCFARAHVDVMASLGKNFTQVRLGASAVTHVRCGGADVRAHVADAKIEVKVGGTPLTAHNHCIFVVDGQAFVPLPGEKLVLVRDDVLLEAQLELDARSEA

SEQ ID NO: 884 - protein, 117 aa, Variola virus
MITLFLILCYFILIFNIIVPAISEKMRRERAAYVNYKRLNKNFICVDDRLFSYNFTTSGIKAKVAVDNKNVPIPCSEINEVNNNKDVDTLYCDKDRDDIPGFTRSCYRAYSDLFFTT

SEQ ID NO: 885 - protein, 152 aa, Human cytomegalovirus
MVMMLRTWRLLPMVLLAAYCYCVFGTCSIGTTTAPVEWKSPDRQIPKNITCANYSGTINGNVTFRGLQNKTEDFLHWLLGWGHKSICSFFPKLQGNYNEQHYRYEVANLTYNCTYNRLTLLNLTTENSGKYYFKREDANFTFYYSCYNLTVS

SEQ ID NO: 886 - protein, 306 aa, Human cytomegalovirus
MAAMEANIFCTFDHKLSIADVGKLTKLVAAVVPIPQRLHLIKHYQLGLHQFVDHTRGYVRLRGLLRNMTLTLMRRVEGNQILLHVPTHGLLYTVLNTGPVTWEKGDALCVLPPLFHGPLARENLLTLGQWELVLPWIVPMPLALEINQRLLIMGLFSLDRSYEEVKAAVQQLQTITFRDATFTIPDPVIDQHLLIDMKTACLSMSMVANLASELTMTYVRKLALEDSSMLLVKCQELLMRLDRERSVGEPRTPARPQHVSPDDEIARLSALFVMLRQLDDLIREQVVFTVCDVSPDNKSATCIFKG

SEQ ID NO: 887 - protein, 874 aa, Cercopithecine herpesvirus
MSSPTRQSADTTNAPTWTHQVHHAARETGSSPSVAAGPLLAGLPIAEEDLAQYTSSVSLARMLYGGDLAEWVPRVHPMVTIERQADGPVSFPDAGAPTSRCVTVVRAPMGSGKTTALLRWLKEAIHSPDTSVLVVSCRRSFTQTLAARFAASGLEEFVTYFSSTNYIMDDRPFHRLIVQVESLHRVGPNLLNNYDVLVLDEVMSTLGQLYSPTMQQLCRVDALLMRLLRACPRIIAMDATANAQLVDFLCGLRGEKNVHVVVGEYAMPGFSERRCLFLQRLGPEVLQEALREEGGGAAEPPAARTGTFFGELEARLAAGNNVCLFSSTVSFAEIAARFCRRFTDRVLLLHSLTPPGDVTTWGEYRVVIYTTVVTVGLSFDPVHFDSMFAYVKPMNYGPDMVSVYQSLGRVRTLRLGELLVYMDGAGARSEPVFTPMLLNHVVGARGRWPAQFSQVTGLLCRRFKGRCDASARGETAAARSSRVYARFRYKHYFERCTLACLADSLNILHTLLTLNCVRARFWGHGEVPSPRDFCRFLRGAHLDALRAQRLLRELRAGDTNVSLQAQAADTEEVGFFVEKYLRPDVSPAEIVALMRGLNGPVGRTRFVHLVLLEACLRVPTAMHSSAVFRRLYDHYATGVIPTVGPAGDIEVVALQPTLNVTPVWELFRLCGGLAQRLRWDSASGGSEGNFSAPDVLALMRPHYERYLQLLFEVGHCNVTDGSLLSEEAVRRVTDALSGRPARGAIGEADHALMLFRILWGELFGVQTVKSTHTFPGVGRVKNLTKDAIVGLLDAHHIDRSACRTHRQLYALLMAHKRDFAEARFRLRAPAWGRCLRARCAGAPPTPDLVLEAALSELPAEAWPMTQGALDFTTI

SEQ ID NO: 888 - protein, 488 aa, Human herpesvirus
MDLDQISETLSSVAEEEPLTMFLLDKLYAIREKIKQVPFSIVRLCHVYCMLIKYNASNNNCILGRKLIEEMQQFLCGTRVDGSEDISMDLSELCKLYDYCPLLCSALCRAPCVSVNKLFKIVERETRGQSENPLWHALRKYTVTATKLYDIYTTRCFLEYKGQQFFGEAVIYGAKHERVIRHLVATFYVKREVKETLGLLLDPSSGVFGASLDACFGISFNEDGFLMVKEKALIFEIKFKYKYLRDKEDHFVSELLKNPTEKSFSDFILSHPVPVIEFRERGKIPSSREYLMTYDFQYRPQRKLRTCPTPAILAPHIKQLLCLNETQKSTVIVFDCKSDLCEQKLSVFQKAVFTVNVFVNPKHRYFFQSLLQQYVMTQFYINDHNNPEYIESTEVPSVHIVTAFFRRRTEEERSLHLVIDETEYIEEEIPLALIVTPVAPNPEFTCCVITDICNLWENNICKQTSLQVWAQSAVNQYLAACVRKPKTP

SEQ ID NO: 889 - protein, 189 aa, Vaccinia virus
MFSKSLNFRFENVKRDYKLVMCSICRIQYDNNKYLDISDSQECNNICYCVITMDPHHLIDLETICVLVDKSGKCLLVNEFYIRFRKNHIYNSFADLCMDHIFELPNTKELFTLRNDDGRNIAWDNDKLESGNNTWIPKTDDEYKFLSKLMNIAKFNNTKFDYYVLVGDTDPCTVFTFKVTKYYINLNYE

SEQ ID NO: 890 - protein, 87 aa, Human herpesvirus
MDPPRTPPPSYSEVLMMDVMCGQVSPHVINDTSFVECIPPPQSRPAWNLWNNRRKTFSFLVLTGLAIAMILFIVFVLYVFHVNRQRR

SEQ ID NO: 891 - protein, 450 aa, Cercopithecine herpesvirus
MPANLSKNDAESVGFSPSSSPIQKKTKRRCVPIPSLSDSDTESDCSSAVVTPGGGDAGSARGSRRPRARGSPRVAGGMYFIDDEAESGSEPDSEPETEADLESVSEADLESVSEADLESVSELTSGVGSDTASDSSSECSGDELREDRPRQIRINIRLVSSPDRRAGVVFPESRGTRSSPGAEAPPPEGHPRSERRAPRARNERWELDLPYMRRSINQMFRLLRRSADPHGAANRLRRLIRDSYLMGYTRRRLEPGMWSHMLQVGGGRAFRLRNVIEGVVSDVGDEGGILALPPSPREHHGVACDHGHTDSSDDDDRLGLSDPDTIDDSDATLESDAEGATPSGSEDPMTPSGTAANGAPRGVATDGASAADAPRSLTSRLEKEFAAFDWTSDEGSQPWLSSVVADTSSAERRRADSPGPRREKDTPGSCRRMRFPTTCPYPCGHTFLRM

SEQ ID NO: 892 - protein, 372 aa, Vaccinia virus
MDKLRVLYDEFVTISKDNLERETGLSASDVDMDFDLNIFMTLVPVLEKKVCAITPTIEDDKIVTMMKYCSYQSFSFWFLKSGAVVKSVYNKLDDVEKEKFVATFRDMLLNVQTLISLNSMYTRLRQDTEDIVSDSKKIMEIVSHLRASTTENAAYQVLQQNNSFIISTLNKILSDENYLLKIIAVFDSKLISEKETLNEYKQLYTISSESLVYGIRCVSNLDISSVQLSNNKYVLFVKKMLPKIILFQNNDINAQQFANVISKIYTLIYRQLTSNVDVGCLLTDTIESAKTKISVEKIKQTGINNVQSLIKFISDNKKEYKTIISEEYLSKEDRIITILQDIVNEHDIKYDNKLLNMRDLIVTFRERYSYKF

SEQ ID NO: 893 - protein, 222 aa, Human cytomegalovirus
MASDVGSHPLTVTRFRCRVHYVYNKLLILTLFAPVILESVIYVSGPQGGNVTLVSNFTSNISARWFRWDGNDSHLICFYKRGEGLSTPYVGLSLSCAANQITIFNLTLNDSGRYGAEGFTRSGENETFLWYNLTVKPKPLETTPASNVTTIVTTTSTVTDAKSNVTGNVSLAPQLRAVAGFSHQTPLENNTHLALVGVVVFLVLIVVCIMGWWKLLCSKSEL

SEQ ID NO: 894 - protein, 305 aa, Human herpesvirus
MALDKSIVVNFTSRLFADELAALQSKIGSVLPLGDCHRLQNIQALGLGCVCSRETSPDYIQIMQYLSKCTLAVLEEVRPDSLRLTRMDPSDNLQIKNVYAPFFQWDSNTQLAVLPPFFSRKDSTIVLESNGFDLVFPMVVPQQLGHAILQQLLVYHIYSKISAGAPDDVNMAELDLYTTNVSFMGRTYRLDVDNTDPRTALRVLDDLSMYLCILSALVPRGCLRLLTALVRHDRHPLTEVFEGVVPDEVTRIDLDQLSVPDDITRMRVMFSYLQSLSSIFNLGPRLHVYAYSAETLAASCWYSPR

SEQ ID NO: 895 - protein, 228 aa, Molluscum contagiosum virus
MPGMNALRHCHGCKHNGLVLEQGYEFCIFCQAVFQHCAKVAKRSNFHVSNKLIHLRNVLRRLLSKQCSGDIIAELRALMARNQLAPADIDANFVSSFLKAHEKINKKDYKLVFEIINQIKDERLELDTQKINEVIEIFKHLVFFCQENTPSKTINYSFFLDKIFTLTSVTRNLRPQTVKNYTKNNSNQLIWENFLVYMRGKKLNTCVHDYGHEYVFVDHGFAACSLEL

SEQ ID NO: 896 - protein, 480 aa, Human herpesvirus
MAIDYAQISCNLASIIEEDSVFLFLIDKLNNLDISRRKISFNFIRLCYTYYILIKFNSRFKDTFLARSFIDYMHQNISDFIDENVELSDLYSNIYVRLQDASPKVVKNLFKILERETRGQSTNPLWHAMRKNCITATKIYDIYISKSFSGIQEHSYLGDAVLYGIKHERIIEHLLKTFFVKKPWISKTLGLLLDPSSGVFGASIDSYYGISFNDNNLIEVGDKVVIFELKFRYKYLREKNDLFVSELLQNPSEIALAKFILSHPIPAIEYRENGKMPSAREYLITNNPLYDSGKKRRACLTPKNLTFDITRLIPMNEKNVSTAIIFDVVKDCILNTLVAYQKAIFTIDAFINPRHRYYFQSILQQYVMTQFYIQDHDNPENIEKENLPSVYIVSAIFRKREDDEKNCRLLIEDTEYLEEEIPLILLITPITIDAEFTSRVIKDICCIWENKIAQQTNLKIWAQSAVRQYMAASSARPKTP

SEQ ID NO: 897 - protein, 74 aa, Vaccinia virus
MSKILTFVKNKIINLINNDQIKYSRVIMIEESDSLLPVDEVHANHGFDCVEMIDENISNENIEQYKTESFFTIN

SEQ ID NO: 898 - protein, 474 aa, Human herpesvirus
MYAEERAYGSFDDVMEVYQQIVTESIQLKRLHFGSGCLIEFLGDSGTCETFCGGWISMICWTSDTNSMGSLTVDIGIDDGKYKTYNARGFLLCSKSITSISQNTEGRDRILTVSQENNKLQITFVTLTKVFKEHDIRNLGDPKCIEKFEKECRALDRKKHDDEHRKRSGKQKEKRKVEDTDKKKDDDRRKQEERKRNDEDKQPDKKEESDELPKEKRQKYHDMKRNLEEQSHEDGITLTSTTLVNGAVEGALPPCISIDNHEDQQHDELDKRAYAQGTNREGLSNEDNYGNFRLNKSLEQLRAKLVASSGDIVERSLLKLKECLDNVKDNLIKNECADVTGPSKCLSKTKHIEPKKQIVFSDCVRPVPVCEIKPFIDVRLFETARSPRRLRQRTRTIVGSTDGAIEQQRVISGQNRGRARGRGRGRAPRRRNSNINNSRTQTTIVIDDSSEAENFENEGSFNEDLLATTILETL

SEQ ID NO: 899 - protein, 458 aa, Cercopithecine herpesvirus
MAYRDARRLYAGAKDDDAGSREVVEQTQTTRCVFPPDTFYNPPRGVAFPAPSTHDPPRAHDARDEEDRLCQIQELLAEMRSSEEPPSGDEDDDEDTDDAPDDVAFPDEEGGDGYAVGPEADRAALVPAAPGGLTTQELERLDREAARAIRRGCKPPSEVAGVVAGLGFAIHRALTPGSEGCVFECSHPEYPQRVVVKAGWYASSVHEARLLRRLSHPAVLALLDVRAVGGLTCLVVPKYRSDLYTYLGARVRPLDTAQVTALARQLLGAIDYIHGEGIIHRDIKTENVLVNGPEDICLGDFGAACFARGSWSTPAHYGIAGTVDTNAPEVLAGDPYTPSVDIWSAGLVIFEAAVHTASLFSVSRTDERHPYDTQILRIIQQAQVHVDEFPQRAGSRLVSQYRHRAARNRRPPHTRPAWTRYYKLDLNVEYLVCRALTFDGARRPSAAELLRLPLFQSS

SEQ ID NO: 900 - protein, 372 aa, Variola virus
MDKLRVLYDEFVTISKDNLERETGLSASDVDMDFDLNIFMTLVPVLEKKVCVITPTIEDDKIVTMMKYCSYQSFSFWFLKSGAVVKSVYNKLDDAEKEKFVATFKDMLLNVQTLISLNSMYTRLRQDTEDIVSDSKKIMEIVSHLRASTTENAAYQVLQQNNSFIISTLNKILSDENYLLKIIAVFDSKLISEKETLNEYKQLYTISSESLVYGIRCVSNLDISSVQLSNNKYVLFVKKMLPKIILFQNNDINAQQFANVISKIYTLIYRQLTSNVDVGCLLTDTIESTKTKISVEKFKQTGINNVQSLIKFISDNKKEYKTIISEEYLSKEDRIITILQNIVNEHDIKYDNNLLNMRDLIVTFRERYSYKF

SEQ ID NO: 901 - protein, 314 aa, Human cytomegalovirus
MKRRRRWRGWLLFPALCFCLLCEAVETNATTVTSTTAAAATTNTTVATTGTTTTSPNVTSTTSNTVTTPTTVSSVSNLTSSTTSIPISTSTVSGTRNTGNNNTTTIGTNATSPSPSVSILTTVTPAATSTISVDGVVTASDYTPTFDDLENITTTRAPTRPPAQDLCSHNLSIILYEEESQSSVDIAVDEEEPELEDDDEYDELWFPLYFEAECNRNYTLHVNHSCDYSVRQSSVSFPPWRDIDSVTFVPRNLSNCSAHGLAVIVAGNQTWYVNPFSLAHLLDAIYNVLGIEDLSANFRRQLAPYRHTLIVPQT

SEQ ID NO: 902 - protein, 316 aa, Varicella-zoster virus
MAMPFEIEVLLPGELSPAETSALQKCEGKIITFSTLRHRASLVDIALSSYYINGAPPDTLSLLEAYRMRFAAVITRVIPGKLLAHAIGVGTPTPGLFIQNTSPVDLCNGDYICLLPPVFGSADSIRLDSVGLEIVFPLTIPQTLMREIIAKVVARAVERTAAGAQILPHEVLRGADVICYNGRRYELETNLQHRDGSDAAIRTLVLNLMFSINEGCLLLLALIPTLLVQGAHDGYVNLLIQTANCVRETGQLINIPPMPRIQDGHRRFPIYETISSWISTSSRLGDTLGTRAILRVCVFDGPSTVHPGDRTAVIQV

SEQ ID NO: 903 - protein, 67 aa, Molluscum contagiosum virus
MEDVDEANLLHLLERLAGSGDDDFGATLAAIRELISAINSKVLTLNKKSKKSARAGEHVPRRENASH

SEQ ID NO: 904 - protein, 551 aa, Varicella-zoster virus
MARSGLDRIDISPQPAKKIARVGGLQHPFVKTDINTINVEHHFIDTLQKTSPNMDCRGMTAGIFIRLSHMYKILTTLESPNDVTYTTPGSTNALFFKTSTQPQEPRPEELASKLTQDDIKRILLTIESETRGQGDNAIWTLLRRNLITASTLKWSVSGPVIPPQWFYHHNTTDTYGDAAAMAFGKTNEPAARAIVEALFIDPADIRTPDHLTPEATTKFFNFDMLNTKSPSLLVGTPRIGTYECGLLIDVRTGLIGASLDVLVCDRDPLTGTLNPHPAETDISFFEIKCRAKYLFDPDDKNNPLGRTYTTLINRPTMANLRDFLYTIKNPCVSFFGPSANPSTREALITDHVEWKRLGFKGGRALTELDAHHLGLNRTISSRVWVFNDPDIQKGTITTIAWATGDTALQIPVFANPRHANFKQIAVQTYVLSGYFPALKLRPFLVTFIGRVRRPHEVGVPLRVDTQAAAIYEYNWPTIPPHCAVPVIAVLTPIEVDVPRVTQILKDTGNNAITSALRSLRWDNLHPAVEEESVDCANGTTSLLRATEKPLL

SEQ ID NO: 905 - protein, 146 aa, Vaccinia virus
MEMDKRMKSLAMTAFFGELNTLDIMALIMSIFKRHPNNTIFSVDKDGQFMIDFEYDNYKASQYLDLTLTPIFGDECKTHASSIAEQLACVDIIKEDISEYIKTTPRLKRFIKKYRNRSDTRISRDTEKLKIALAKGIDYEYIKDAC

SEQ ID NO: 906 - protein, 137 aa, Human adenovirus
MISVDVPGHPGDAGGGGGGARKVADAVPDVAQRQKVLHGRDALAGEACAVVDALDRAKGEPVSGHSSVVWWINSQGYHGGRPGFEPRIRPSAVIHAVTARVSNPGVRRQTTGERSFWLPSRRGGCCASFFGHWPRAA

SEQ ID NO: 907 - protein, 203 aa, Cercopithecine herpesvirus
MAASPATIAYSLHGTATSSACVLPDAEQVVCAFDGGTRAIASRGCLRQDTLSRGAVVVRQTPVGLLVMVDCRTDFCAYRFVGRSGRQRLERWWDTNLCAYPFDSWVSSTRGESVRSPTAGIVTVVWGEDSIYITVTVYGSPPGGEAEAPLPDPSSPPLDAPGTPSPPAVSPASAEAGAAADLLVEVMKEIQLSPTLGFGQHEP

SEQ ID NO: 908 - protein, 99 aa, Vaccinia virus
MSCYTAILKSVGGLALFQVANGAIDLCRHFFMYFCEQKLRPNSFWFVVVRAIASMIMYLVLGIALLYISEQDDKKNTNNDGSNNDKRNESSINSNSSPK

SEQ ID NO: 909 - protein, 275 aa, Human cytomegalovirus
MLLRYITFHREKVLYLAIACFFGIYISFHDACILVPAKVGTNVTLNAVHVHDGDYVYWSFGGGGANRLMCRYTPRLDEIHKNTNRSFSCLTNHSLLLINVTEEYTDYYRTMTTFVHQSHNWHNHGNKWTLDTCYYVYVTQNGTLPTTTTKKPTTTTRTTTTTTTKKTTTTSTTTTTTTTKKTTTSTTHHRHSNPKESTTPKTHVELHVGLGATAAETPLQPSPQYQHVATHALWVLAVVIVIIIIIIFYFRIPQKLWLLWQHDKHGIVLIPQTDL

SEQ ID NO: 910 - protein, 80 aa, Human cytomegalovirus
MSSDSNFDPWIPVCVVVVMTSVVLFAGLHVYLWYVRRQLVAFCLEKVCVRCCGKDETTPLVEDAEPPAELEMVEVSDECY

SEQ ID NO: 911 - protein, 302 aa, Cercopithecine herpesvirus
MGVVVVTVMTLLDRHAALPRTSADANPLLWNFLLRQCRILAAEPLGTPVVVRSADLRRVAAPLMDLPRPDRPVARTRACDCVSGAASDVFPEDAAWESEEVADAAACFRSLCEPRPRPRLYHLWVVGAADLCVPFLEHLRRARVGARLVTIRVTDAWAEGGSWPLPDGLAVGETVPWTPFPTAHNHPLAALFGGYEYRYGVVRPNDVVAAAPRPRGCMGWLRETVPRLWPGSESAAAEAAKTPTEPHPARRPCVACRGGGLGVPRDAEARVVAEEATPERAWNPEPEERPRLPHICYATPSM

SEQ ID NO: 912 - protein, 278 aa, Epstein-Barr virus
MEACPHIRYAFQNDKLLLQQASVGRLTLVNKTTILLRPMKTTTVDLGLYARPPEGHGLMLWGSTSRPVTSHVGIIDPGYTGELRLILQNQRRYNSTLRPSELKIHLAAFRYATPQMEEDKGPINHPQYPGDVGLDVSLPKDLALFPHQTVSVTLTVPPPSIPHHRPTIFGRSGLAMQGILVKPCRWRRGGVDVSLTNFSDQTVFLNKYRRFCQLVYLHKHHLTSFYSPHSDAGVLGPRSLFRWASCTFEEVPSLAMGDSGLSEALEGRQGRGFGSSGQ

SEQ ID NO: 913 - protein, 287 aa, Vaccinia virus
MDEIVKNIREGTHVLLPFYETLPELNLSLGKSPLPSLEYGANYFLQISRVNDLNRMPTDMLKLFTHDIMLPESDLDKVYEILKINSVKYYGRSTKADAVVADLSARNKLFKRERDAIKSNNHLTENNLYISDYKMLTFDVFRPLFDFVNEKYCIIKLPTLFGRGVIDTMRIYCSLFKNVRLLKCVSDSWLKDSAIMVASDVCKKNLDLFMSHVKSVTKSSSWKDVNSVQFSILNNPVDTEFINKFLEFSNRVYEALYYVHSLLYSSMTSDSKSIENKHQRRLVKLLL

SEQ ID NO: 914 - protein, 70 aa, Human SARS coronavirus
MLPPCYNFLKEQHCQKASTQREAEAAVKPLLAPHHVVAVIQEIQLLAAVGEILLLEWLAEVVKLPSRYCC

SEQ ID NO: 915 - protein, 467 aa, Cercopithecine herpesvirus
MAGWRAAGSGLCLFVLMWLLCAGAGAPRGAASTPAGRPGASRPGGVERANRTAAPARGRGSSNGTGPGSTSAQFRCKRPDVSALYGSRVVIGCRLPRPTADFRLQIWRVAAAAHTEPVEPGAVLVNVTAPPDGELVYDSAPNRTEARVRWAEGAGPDARPRVYSIEGTFPTQRLVIQELTVARQGLYLWIRGPAERPLRYGTWTRVRMLRRPSLSIRAHTVLEGEPFGATCVAANYYPGDRAAFRWFEGGGEVVAPERVQTRVDAQRNGFSATSTLTSEARAGLAPPRNLTCEFTWHRDSVSFSRRNATGAPTVLPRPTIEMEFGSGEAVCTAACVPEGVELQWLLGADPAPAEDAAASGGPCPGHPGLARVRSALPLSREHSEYTCRLVGYPPTVPVLEHHGRHEPAPRDPVGQQVTTALEWAGIAAGSAAAIGLAVGVGVYVRRAVARRRRVRTGRWAGEPARRG

SEQ ID NO: 916 - protein, 94 aa, Human parvovirus
MQNNTTGMDTKSLKNCGQPKAVCTHCKHSPPCPQPGCVTKRPPVPPRLYLPPPVPIRQPNTKDIDNVEFKYLTRYEQHVIRMLRLCNMYQNLEK

SEQ ID NO: 917 - protein, 334 aa, Human herpesvirus
MKRACSRSPSPRRRPSSPRRTPPRDGTPPQKADADDPTPGASNDASTETRPGSGGEPAACRSSGPAALLAALEAGPAGVTFSSSAPPDPPMDLTNGGVSPAATSAPLDWTTFRRVFLIDDAWRPLMEPELANPLTAHLLAEYNRRCQTEEVLPPREDVFSWTRYCTPDEVRVVIIGQDPYHHPGQAHGLAFSVRANVPPPPSLRNVLAAVKNCYPEARMSGHGCLEKWARDGVLLLNTTLTVKRGAAASHSRIGWDRFVGGVIRRLAARRPGLVFMLWGTHAQNAIRPDPRVHCVLKFSHPSPLSKVPFGTCQHFLVANRYLETRSISPIDWSV

SEQ ID NO: 918 - protein, 334 aa, Human herpesvirus
MADERTSDSVKTRYDIALMKLNDIKIAVFRDSLSTYVEQKTGLTIQFNWPKSRCLVISTLCKIPFPTKSAAELQEMCSLLLCCPERLQLLGYVSVWGEETRDVCLTKTLVFAGEDEKFYGLDFVNETLYLLAETTERFAVLGLRRYDPVYREKDIRFLTKIDDVLQSLIDAQDNLWKFATIVYKNSGRHYIMKSCLENNDGVFVLFLTRKEDFPSRMEWNFFSDVYESMPYDGQVIGSIGKTLLYPKTMFVMMDLSGAIYGIDTIGTGIGSCVKIADDFESFLRQGIVRGYRRYKFFHRNINTVQEILPLCPHTSLGPTFSNNYIYDLSSEDDE

SEQ ID NO: 919 - protein, 700 aa, Cercopithecine herpesvirus
MEPSRGLGAPARPAAEAPAEDALEDDDLVLLSRYFFPDTDSDDDDNDDDAAAVVDDDPASDAAAADGTGLSAPAPPRETCAVCTERIDEAQLCNTFPCLHRFCIPCLKTWLPMRNSCPLCNAAVSYLIVGVQANGSYSTIPVVNDPRTRRDAEDAVRAGTAVDFIWVDRPGEPAPSSVTLGGRTVRALSPPARMGRPGVVGRVSRPPRSPPPPPAPPAPDSPPASLSLRPSADPTFHPAPARGARAPAARGDAARAHRASTRGGARGGARGAAAPRAPAPAGNPAPIVIGDSPPASPRRPSGAAAPPVVPVAPRPRPAAEPPAPAPGAAPRQPAHQTQAQARAQARTQARAQAVLAQALAQALTQARPGAQAQPRPGAQVPPGAQVPPGAQVPPGAQVPPGAQAQPRPAAQAQPAAQVPPGAQARPQARARPAAPPQAPPLCAVVAAAAAARKRPASASEAAPATRGPKRPSLPPPPGGPAPPRRAPARAPALAAAPPPPRPLAPPAAPPPPQAAPPPPAAPPPPPVETRDRSSLGPRPAEQGPRKCVRKTRHVDAEGAPAAPGPTRYLPISGVSSVVAMAPYLNKTVTGDCLPVLDMETGDIGAYVVLVGRACNMARALAEASPGWSRRTRLPEAAPGRVSPPEYPGDPAHGLWMTPVGGMLFDQGALLGGRSFHSLDSRHPWTPGPADPPPTRGSGGP

SEQ ID NO: 920 - protein, 278 aa, Epstein-Barr virus
MEACPHIRYAFQNDKLLLQQASVGRLTLVNKTTILLRPMKTTTVDLGLYARPPEGHGLMLWGSTSRPVTSHVGIIDPGYTGELRLILQNQRRYNSTLRPSELKIHLAAFRYATPQMEEDKGPINHPQYPGDVGLDVSLPKDLALFPHQTVSVTLTVPPPSIPHHRPTIFGRSGLAMQGILVKPCRWRRGGVDVSLTNFSDQTVFLNKYRRFCQLVYLHKHHLTSFYSPHSDAGVIGPRSLFRWASCAFEEVPGLAMGDSGLSEALEGRQGRGFGSSGQ

SEQ ID NO: 921 - protein, 439 aa, Vaccinia virus
MGVANDSSPEYQWMSPHRLSDTVILGDCLYFNNIMSQLDLHQNWAPSVRLLNYFKNFNKETLLKIEENDYINSSFFQQKDKRFYPINDDFYHISTGGYGIVFKIDNYVVKFVFEATKLYSPMETTAEFTVPKFLYNNLKGDEKKLIVCAWAMGLNYKLTFLHTLYKRVLHMLLLLIQTMDGQELSLRYSSKVFLKAFNERKDSIKFVKLLSHFYPAVINSNINVINYFNRMFHFFEHEKRTNYEYERGNIIIFPLALYSADKVDTELAIKLGFKSLVQYIKFIFLQMALLYIKIYELPCCDNFLHADLKPDNILLFDSNEPIIIHLKDKKFVFNERIKSALNDFDFSQVAGIINKKIKNNFKVKHNWYYDFHFFVHTLLKTYPEIEKDIEFSTALEEFIMCTKTDCDKYRLKVSILHPISFLEKFIMRDIFSDWINGGN

SEQ ID NO: 922 - protein, 171 aa, Human papillomavirus
MAILKWKLSRWHTSDQISTTETADPKTTEATNNESTQGTKRRRLDLPDSRDNTQYSTKYTDCAVDSRPRGGGLHSTTNCTYKGRNVCSSKVSPIVHLKGDPNSLKCLRYRLKPFKDLYCNMSSTWHWTSDDKGDKVGIVTVTYTTETQRQLFLNTVKIPPTVQISTGVMSL

SEQ ID NO: 923 - protein, 1247 aa, Cercopithecine herpesvirus
MGLLGRGGPEAGSAARAASGFFGPAAARATDSAPRPRENFYNPYLAAGRRSNAARPAQAAPHTYCSECDEFRFVAPRALDEDAPPEMRVGVHDGRLKRAPRVYCGGEERDVLDFGQDAFWPRRARLWAGADHAPAGFAPAVDLFHVYDIVENVEHAQHGAHAGHAHGRFLDAITPSGTVITLLGLTPEGRRVAVHVYGTRQYFYMNKAEVDRRLGCRAPRDLCERMAAALRESPGGSFRSISADHFEVDVVDRADVYYYETPRVPYYRVHARNGRALSHLCDNFCPGIRKYEGGVDATTRFVLDNPGFVTFGWYRLGRGRDGTPPHPRPASAFVTSSDVEIDCMADNLTVERERGDLPGYKLMCFDIECKAGGEDEAAFPVAANAEDLVIQISCLLYDLATTRLEHILLFSLGSCDLPEAFVADLEARGLPAPTVLEFDSEFEMLLAFVTFVKQYGPEFATGYNIINFDWPFLIAKLTDVYKVPLDGYGRMNRRGVFRVWDIGQSHFQKRSKIKMNGVINIDMYGIVCDKVKLSSYKLNAVAEAVLKDKKKDLNYRDIPRYYAAGPAQRGVIGEYCVQDSLLVGQLFFKFLPHLELSAVARLAGITLTRTIYDGQQIRVYTCLLRLAGQKGFLLPDNQGRFAAASQATTATGRAGDEEEDDAGGEEAGDAAADGGEDADAIGDGGAAGSAREGGGGRHVGYQGAKVLDPTSGFHVDPVVVFDFASLYPSIIQAHNLCFSTLSLSADAVAGLEPDRDYLAIEVGGRRLFFVKAHVRESLLSILLRDWLAMRKQIRSRIPQSTPEEAVLLDKQQAAIKVVCNSVYGFTGVQHGLLPCLHVAATVTTIGRDMLLATREYVHERWMTLDRLEADFPEAAGMRAPGPYSMRIIYGDTDSVFVLCRGLTAEGLTAMGDRMAAHISRALFLPPIKLECEKTFTKLLLIAKKKYIGVVCGGKMLIKGVDLVRKNNCAFINRTSRALVDLLFYDDAVSAAAAALAARPAEEWLARPLPVGLDAFGRVLVDAHRRITDPDRDVRDFVLTAELSRHPRAYANKRLPHLTVYYKLLARRDQVPSIKDRIPYVIVAQTREVEETVARIDALRELDAAPPAPEPASLGEGSPRPPDRPSPTGPAPKRPHGRQAGESEAKRRKLLVSELAEDPGHAVSHRVPLNTDYYFSHLIGAACVTFKALFGNNAKITENLLKRFIPEVWHPEEETAIRLRGAGFRAAGAGATEEETRQRLRRAFDTLA

SEQ ID NO: 924 - protein, 377 aa, Variola virus
MGAAVTLNRINIASGIADIRDKYMELGFNYPKYNRTVKFAEESYMYYYETSPGEIKPKFCLIDGMSIDHCSSFIVPEFAKQYVLIHGEPCSSFKFRPGTLIYYQNEVTPEYIKDLKHATDYIASGQRCHFIKKDYLLGDSDSVAKCCSKTNTKHCPKIFNNNYKTEHCDDFMTGFCRNDPGNPNCLEWLRVKRKPAMSTYSDICSKHMDARYCSEFIRIIRPDYFTFGDTALYVFCNDHKGNRNCWCANYPKSNSGDKYLGPRVCWLHECTDESRDRKWLYYNQDVQRTRCKYVGCTINVNSLALKNSQAELTSNCTRTTSTVGDIHPGEPVVKDKIKLPTWLGAAITLVVISVIFYFISIYSRPKIKTNDINVRRR

SEQ ID NO: 925 - protein, 237 aa, Influenza A virus
MDSNTVSSFQVDCFLWHVRKQVVDQELGDAPFLDRLRRDQKSLRGRGSTLGLNIEAATHVGKQIVEKILKEESDEALKMTMASTPASRYITDMTIEELSRDWFMLMPKQKVEGPLCIRIDQAIMDKNIMLKANFSVIFDRLETLILLRAFTEEGAIVGEISPLPSFPGHTIEDVKNAIGVLIGGLEWNDNTVRVSKTLQRFAWGSSNENGRPPLTPKQKRKMARTARSKVRRDKMAD

SEQ ID NO: 926 - protein, 1121 aa, Human herpesvirus
MSAHPDDLFWQQILNMDPTELLSDDVISSTCDENTAAGTDIMQPLCVDMSVQPTTSGCHTGAMMSDSYFSNDTPDQNCQSHSTLTDLSPEDMNNQINVQPNQMTFQPISPPIQDQNYGYSNNMINPIKPASIIKLHGHSIGEMTVTDPSSHVNAQHFVQQSNPKFFLNMYPCMTANSQGPGECQSVHNQSSGSGSNSYDINTAPRDEWIFTTSGGESWVLKRNTPNPPNSRTNLIFNNAQPIFHTQPQVSGFSDCSYQGGGLNSREYVNLAGYTPVCNMQNIKNSWATQLGASIDCMTASPTGIDANVNSAFQPVGVVSNNRGANVSMGGMGNYIENNSPWNQYYKSEMANNSINVKESNVYGHVGCVNDAISDKQGGTANVPSSLLNPDHQDWMRMTGTNTHMLNNINTNTEMENYDFPENDGNVHGATGVDLSTLSNGQQHSAFEGNGTFPVVNTGNPRTTLNCAPQLFLLGGNPTIAHPMNGNNETPDKNVCKPTPSTGVIKKLNFDGVDRGGGIGNFPKLASFVAMREKMSNTVNPSCGTFLEQLEGLRQQNSFEKNISFADLHFSEEDDVLSSASSVSCNSNCDMKIEVSQQGITVSNLQQGFRQQMNMNSSVVKMDGSYKTQEMSNGCATDVTDNAGTIQQNKRIHSQNENPEDGQVREGGCSDVRNEPPRKSARIHNMKSEGVTCGMCMTAADSTRQDASGGSSSGTKNEYYDDESELTGLSDTDSDNEVQCCQEVTKVGPKTYSSENFNPEYRQAKRLLADIPYRRWIPDPVNMEDNDGPFIPIVTRPATVCMNGRRRRTFFRQCVTAFGPLSKLTYFKELLQSYVSKNNNSYLSISWPPKHGVYVMSEKKLGYEHIPTLKDKFPLPCGWMMVLGVVGAEPPAALNKNMVILLCENRWVLLHNYSNSTHELFLAASDLKQFMEEGLSRCDPIYEESTVPYGVAMENSLRDFLRNSRTFQDLMDQRDNMHGCNWTFNGMPGRLGDRVIHLCNPESVDSIPGDEAVVCEGRPLYFFAYVTTFKSNPATKATVLIAADKDLRIYGYHKGRPRIRYLCKNVKTFFKAGARKFYLDFQITPKRLLAVNEEEYLNTLQNAPCLLLKPSVFRNIYSQEGK

SEQ ID NO: 927 - protein, 147 aa, Molluscum contagiosum virus
MRATGAFLVLAILVRARAHPARYGCRPPDDGNETDADVLRRCRSCCNSLSDALRLCTRDLERARSKAEQYSRLEEQFRLAVFALIFSTAFTLAYILAHGYFPRRAFTWMLQLLQRRRAANQREQFEHVFERAELPAHAAPPVGAPAA

SEQ ID NO: 928 - protein, 369 aa, Human herpesvirus
MSQWGPRAILVQTDSTNRNADGDWQAAVAIRGGGVVQLNMVNKRAVDFTPAECGDSEWAVGRVSLGLRMAMPRDFCAIIHAPAVSGPGPHVMLGLVDSGYRGTVLAVVVAPNGTRGFAPGALRVDVTFLDIRATPPTLTEPSSLHRFPQLAPSPLAGLREDPWLDGALATAGGAVALPARRRGGSLVYAGELTQVTTEHGDCVHEAPAFLPKREEDAGFDILIHRAVTVPANGATVIQPSLRVLRAADGPEACYVLGRSSLNARGLLVMPTRWPSGHACAFVVCNLTGVPVTLQAGSKVAQLLVAGTHALPWIPPDNIHEDGAFRAYPRGVPDATATPRDPPILVFTNEFDADAPPSKRGAGGFGSTGI

SEQ ID NO: 929 - protein, 1164 aa, Vaccinia virus
MKKNTNSEMDQRLGYKFLVPDPKAGVFYRPLHFQYVSYSNFILHRLHEILTVKRPLLSFKNNTERIMIEISNVKVTPPDYSPIIASIKGKSYDALATFTVNIFKEVMTKEGISITKISSYEGKDSHLIKIPLLIGYGNKNPLDTAKYLVPNVIGGVFINKQSVEKVGINLVEKITTWPKFRVVKPNSFTFSFSSVSPPNVLPTRYRHYKISLDISQLEALNISSTKTFITVNIVLLSQYLSRVSLEFIRRSLSYDMPPEVVYLVNAIIDSAKRITESITDFNIDTYINDLVEAEHIKQKSQLTINEFKYEMLHNFLPHMNYTPDQLKGFYMISLLRKFLYCIYHTSRYPDRDSMVCHRILTYGKYFETLAHDELENYIGNIRNDIMNNHKNRGTYAVNIHVLTTPGLNHAFSSLLSGKFKKSDGSYRTHPHYSWMQNISIPRSVGFYPDQVKISKMFSVRKYHPSQYLYFCSSDVPERGPQVGLVSQLSVLSSITNILTSEYLDLEKKICEYIRSYYKDDISYFETGFPITIENALVASLNPNMICDFVTDFRRRKRMGFFGNLEVGITLVRDHMNEIRINIGAGRLVRPFLVVDNGELMMDVCPELESRLDDMTFSDIQKEFPHVIEMVDIEQFTFSNVCESVQKFRMMSKDERKQYDLCDFPAEFRDGYVASSLVGINHNSGPRAILGCAQAKQAISCLSSDIRNKIDNGIHLMYPERPIVISKALETSKIAANCFGQHVTIALMSYKGINQEDGIIIKKQFIQRGGLDIVTAKKHQVEIPLENFNNKERDRSNAYSKLESNGLVRLNAFLESGDAIARNISSRTLEDDFARDNQISFDVSEKYTDMYKSRVERVQVELTDKVKVRVLTMKERRPILGDKFTTRTSQKGTVAYVADETELPYDENGITPDVIINSTSIFSRKTISMLIEVILTAAYSAKPYNNKGENRPVCFPSSNETSIDTYMQFAKQCYEHSNPKLSDEELSDKIFCEKILYDPETDKPYASKVFFGPIYYLRLRHLTQDKATVRCRGKKTKLIRQANEGRKRGGGIKFGEMERDCLIAHGAANTITEVLKDSEEDYQDVYVCENCGDIAAQIKGINTCLRCSKLNLSPLLTKIDTTHVSKVFLTQMNARGVKVKLDFERRPPSFYKPLDKVDLKPSFLV

SEQ ID NO: 930 - protein, 605 aa, Colorado tick fever virus
MLKRPAYYNIFLLPTGRRLAKTYNILENLITLPKTDWKLYETIEQKLKWMIQEYRSDWRDRLSHHERYGMKVRLTYRSESERTKLEEKITDLVISHGKKASTVHFCTRESYKGRVRANQILILLEPEGLGEVEGLTVRAEGNWMSLVTHCLFILGSTLTCFGFVDPARGCRFNLLPYIKTLHPNDKWLLDLQASWRLEYGVSRSIEEGALYDFFAESHTLYAVRTWPGCEKYLGALEAFVGRLAVLPAQVLTSKEHDFQSKLMSKAKKTGFHYLYYLVSFTMKTSLTDRIVKEALATVKVFSFVVGRDHLPAVGVYSGEDFSKQFLSMAVGTMDTPSRYAITIVSGMQVDVDVKSVTGIASFKDGTQHTIVDEILLQPARLVLLGRKGGGKSRLSKIFSELGYNVLDSDTYGKVLTLVADRGEDGLDDALKKFVRLTPDERKAVPSIFETEMDRLCEVFGSRGLRPYAQRCQQQAGRLHWELYAAFQEFYDRTIRVITPDKFRFAYFAELERGGFDDNGLTFSPELKTVVFVHSMPELFEAMGGCVAEIVPTHSTRLAILLRGQGLSVNAELHLHDFYVALNQNGARKVSLGWLVHALNELLKMR

SEQ ID NO: 931 - protein, 683 aa, Cercopithecine herpesvirus
MAERHPRAARPPARPFDAAPRPPDDGWVQVHPTPTTMLFREALLGELGYTEGQGVYNVVRSSEAVTRQLQAAVFGALLNAAAHRDLEADWRRHVAARRLEPERLVRRYGGAPDGDVAAVAERVYDTWRAALRASLLDFARGLADCFAQGGPGGPVGFSRYIDWLMCLGLVPVMRRPREGEVTQRLEAFLSDHALPRDLATVAGAVERAAPGLRELARAFDSARIADYDRVCLFYHPRRGEWRVRDPAGAQRGECVVLWPPLWTGDRLLFDSPMQRLSREIVACRALREHARVCRLRNAASVKVLLGRKNDGDRGAAGAARAVSRALGEDDASKAGSAASRLVRLIINMKGMRHIGDINDTVRAYLDEAGGHLIDSAAVDPALPGFGRATGRPAAGGADPAAPRQQQLRQAFQTSVVNNINGMLEGYINNLFGTIERLRETNTDLATQLRDRDIELRRARLGALDRQQRAADPGRAPEAEPAGQDDLRTDYDIIDVSKAMDDDTYVANSFQHQYVPSYAQDLERLSRLWEHELLRCFKISRHTNNQGRETAIFYSSGAIALFVAPYFASVLRAPAMGALITGPNGVLGEEELWEAIFKKTRVQTYLTDLAALFVADVRHAARSRPPAPEPADPDRRVRERPRGRSRSPVDAGRPGGRGPEDAWGGRGDHGHLDPRRGGDGGRRP

SEQ ID NO: 932 - protein, 192 aa, Vaccinia virus
MADKKNLAVRSSYDDYIETVNKITPQLKNLLAQIGGDAAVKGGNNNLNSQTDVTAGACDTKSKSSKCITCKPKSKSSSSSTSTSKGSKNTSGAPRRRTTVTTTSYNAMDGQIVQAVTNAGKIVYGTVRDGQLEVRGMVGEINHDLLGIDSVNAGKKKPSKKMPTNKKINMSSGMRRQEQINPDDCCLDMGMY

SEQ ID NO: 933 - protein, 566 aa, Influenza A virus
MKTIIALSYIFCLVLGQDFPGNDNSTATLCLGHHAVPNGTLVKTITNDQIEVTNATELVQSSSTGKICNNPHRILDGIDCTLIDALLGDPHCDGFQNETWDLFVERSKAFSNCYPYDVPDYASLRSLVASSGTLEFISEGFTWTGVTQNGGSNACKRGPDIGFFSRLNWLYKSGSTYPVLNVTMPNNDNFDKLYIWGVHHPSTDQEQTSLYVQASGRVTVSTKRSQQTIIPNIGSRPWVRGLSSRISIYWTIVKPGDILVINSNGNLIAPRGYFKMRTGKSSIMRSDAPIGTCISECITPNGSIPNDKPFQNVNKITYGACPKYVKQNTLKLATGMRNVPEKQTRGLFSAIAGFIENGWEGMIDGWYGFRHQNSEGTGQAADLKSTQAAIDQINGKLNRVIEKTNEKFHQIEKEFSEVEGRIQDLEKYVEDTKIDLWSYNAELLVALENQHTIDLTDSEMNKLFEKTRRQLRENAEDMGNGCFKIYHKCDNACIGSIRNGTYDHDVYRDEALNNRFQIKGVELKSGYKDWILWISFAISCFLLCVVLLGFIMWACQKGNIRCNICI

SEQ ID NO: 934 - protein, 150 aa, Human cytomegalovirus
MERNSLLVCQLLCLVARAAATSTAQTTLPSTVNSTATGVTSDSQQNTTQLPASSAAALSLPSASAVQAHSPSSFSDTYPTATALCGTLVVVGIVLCLSLASTVRSKELPSDHEPLEAWEQGSDVEAPPLPEKSPCPEHVPEIRVEIPRYV

SEQ ID NO: 935 - protein, 579 aa, Cercopithecine herpesvirus
MDPYYPFDALDVWVHKRFIVADARAFITPEFPPEFWAAPAFNIPRETAEERVAVLEARRRAAAAALENAALQAADVPVEIERRLRPIERNLDRVTGALEALETAAAVAEEADAAAEAATAADAAEGSAADAAAGPGELEVQIVRNDPPLRYDANLPVDMLRMVYAGRAAGGSTGVVFGTWYRTIQDRTAADFPLTARSADFRDGRMSKTFMTALVLSLQSCGRLYVGHRHYSALECAVLCLYLLHRACGPEDDRPPGSFAGLLERLPRYLANLTRAIGDEGGRPQYRYREDRLPKTQFAAAGGRYERGVLAGHAVVATLLRHGVLPAAPGDVPRDAAADVNPGGRAHADEVNRAAAAFLSRGHNLFLWEDQTLLRATVNTITALVVLQRLLANGNVYADRLDNRLQLGMLIPGAVPSEAIARGASGADSGAVKSGDNNLEALCANYVGPLYRADAAVELTQLFPGLAALCLDAQAARAVAPGRRVVDMSSGARQAALVRLTALELVNRTRTNTTPVGEVIAAHDALAIQYEQGLGLLAQQARIGLASNHKRFGAFNVGSDYDLLYFLCLGFIPQYLSAA

SEQ ID NO: 936 - protein, 210 aa, Human herpesvirus
MDPTLYCVVAVDTKLGIGKNRCLPWPALRGDMRRFRQLTTDCAPGKQNMVVMGRRTWLSIPAGCRPLAGRINVVLSRTLETPPPGAHFLASSLDAALGLARSPELAQQIDKVWVIGGGNLYREALTGPWPVRLFLTRVLHDFACDVFLSHDSLAAYARVNPKPGEQERVFQERGIFYMFETYIKVTQSSDTALPDLERPRPATPPFSETS

SEQ ID NO: 937 - protein, 1286 aa, Vaccinia virus
MAVISKVTYSLYDQKEINATDIIISHVKNDDDIGTVKDGRLGAMDGALCKTCGKTELECFGHWGKVSIYKTHIVKPEFISEIIRLLNYICIHCGLLRSREPYSDDINLKELSGHALRRLKDKILSKKKSCWNSECMQPYQKITFSKKKVCFVNKLDDINVPNSLIYQKLISIHEKFWPLLEIHQYPANLFYTDYFPIPPLIIRPAISFWIDSIPKETNELTYLLGMIVKNCNLNADEQVIQKAVIEYDDIKIISNNTSSINLSYITSGKNNMIRSYIVARRKDQTARSVIGPSTSITVNEVGMPAYIRNTLTEKIFVNAFTVDKVKQLLASNQVKFYFNKRLNQLTRIRQGKFIKNKIHLLPGDWVEVAVQEYTSIIFGRQPSLHRYNVIASSIRATEGDTIKISPGIANSQNADFDGDEEWMILEQNPKAVIEQSILMYPTTLLKHDIHGAPVYGSIQDEIVAAYSLFRIQDLCLDEVLNILGKYGREFDPKGKCKFSGKDIYTYLIGEKINYPGLLKDGEIIANDVDSNFVVAMRHLSLAGLLSDHKSNVEGINFIIKSSYVFKRYLSIYGFGVTFKDLRPNSTFTNKLEAINVEKIELIKEAYAKYLNDVRDGKIVPLSKALEADYVESMLSNLTNLNIREIEEHMRQTLIDDPDNNLLKMAKAGYKVNPTELMYILGTYGQQRIDGEPAETRVLGRVLPYYLPDSKDPEGRGYILNSLTKGLTGSQYYFSMLVARSQSTDIVCETSRTGTLARKIIKKMEDMVVDGYGQVVIGNTLIKYAANYTKILGSVCKPVDLIYPDESMTWYLEISALWNKIKQGFVYSQKQKLAKKTLAPFNFLVFVKPTTEDNAIKVKDLYDMIHNVIDDVREKYFFTVSNIDFMEYIFLTHLNPSRIRITKETAITIFEKFYEKLNYTLGGGTPIGIISAQVLSEKFTQQALSSFHTTEKSGAVKQKLGFNEFNNLTNLSKNKTEIITLVSDDISKLQSVKINFEFVCLGELNPNITLRKETDKYVVDIIVNRLYIKRAEITELVVEYMIERFISFSVIVKEWGMETFIEDEDNIRFTVYLNFVEPEELNLSKFMMVLPGAANKGKISKFKIPISDYTGYDDFNQTKKLNKMTVELMNLKELGSFDLENVNVYPGVWNTYDIFGIEAAREYLCEAMLNTYGEGFDYLYQPCDLLASLLCASYEPESVNKFKFGAASTLKRATFGDNKALLNAALHKKSEPINDNSSCHFFSKVPNIGTGYYKYFIDLGLLMRMERKLSDKISSQKIKEMEETEDF

SEQ ID NO: 938 - protein, 369 aa, WU polyomavirus
MACTAKPACTAKPGRSPRSQPTRVQSLPKQVRKGGVDVLAAVPLSEETEFKVELFVKPVIGNAEGTTPHYWSISSPLKTAEAANVTPDADTTVCYSLSQVAPPDIPNQVSECDMLIWELYRMETEVLVLPVLNAGILTTGGVGGIAGPQLYFWAVGGQPLDVLGLAPTEKYKGPAQYTVNPKTNGTVPHVYSSSETPRARVTNEKYSIESWVADPSRNDNCRYFGRMVGGAATPPVVSFSNNSTIPLLDENGIGILCLQGRLYITCADLLGVNKNRVHTGLSRFFRLHFRQRRVRNPYTINLLYKQVFNKPADDISGQLQVTEVTMTEETGPLPPTVEGNVGVPTTSNLSHLPATVTLQATGPILNTQG

SEQ ID NO: 939 - protein, 262 aa, Human herpesvirus
MYVCCGRGEKLQPVGYVRNRAAPSDLNSLRVLLIARDGAMYVHHMRTARLCRLASSVTEFARRGLQRESEVYEDDVSLPDRRVGSATAIHLFDVITQAADVHDLLTVAGLCQTHTGVSCQLWYTDHDPHTVAGAARFTLTVARQQYRLWPNARRKLLQHLHPDHPLGLWLLCAVLTYDAKETNRAVPPVTPGAETVWVIVTGRGAILGFWPESAKMCRLASSMKGLWKNGARALKGHWTYAAPGRHRAGEAWPLCAHYQSPR

SEQ ID NO: 940 - protein, 141 aa, Molluscum contagiosum virus
MDPLSVFFLVVAAAAVCTLLLQAYAVYENFDSILEFNDAHASLEYSKSLGGSYIDKHVFDPNDGVADVTQKWRCALYGKVYVSASAFGFYAQPDGSKRTFSTRDDCVDFTFGTADTSRVVNPCTDPNGAQAEDCAFLKSVL

SEQ ID NO: 941 - protein, 564 aa, Human adenovirus
MQQAPDPAIRAALQSQPSGLASDDWEAAMQRIMALTTRNPESFRQQPQANRLSAILEAVVPSRTNPTHEKVLAIVNALAENKAIRPDEAGLVYNALLERVGRYNSTNVQSNLDRLVTDVREAVAQRERFKNEGLGSLVALNAFLATQPANVPRGQDDYTNFISALRLMVTEVPQSEVYQSGPDYFFQTSRQGLQTVNLSQAFKNLRGLWGVQAPVGDRSTVSSLLTPNSRLLLLLIAPFTDSGSVNRNSYLGHLLTLYREAIGQAQVDEQTFQEITSVSRALGQNDTDSLRATLNFLLTNRQQKIPAQYALSAEEERILRYVQQSVGLFLMQEGATPSAALDMTARNMEPSMYAANRPFINKLMDYLHRAASMNSDYFTNAILNPHWLPPPGFYTGEYDMPDPNDGFLWDDVDSAVFSPTLQKRQEAVRTPASEGAVGRSPFPSLGSLHSLPGSVNSGRVSRPRLLGEDEYLNDSLLQPPRVKNAMANNGIESLVDKLNRWKTYAQDHREPAPAPRRQRHDRQRGLVWDDEDSADDSSVLDLGGSGGVNPISRILQPKLGRRMF

SEQ ID NO: 942 - protein, 103 aa, Human cytomegalovirus
MARRLWILSLLAVTLTVALAAPSQKSKRSVTVEQPSTSADGSNTTPSKNVTLSQGGSTTDGDEDYSGEYDVLITDGDGSEHQQPQKTDEHKENQAKENEKKIQ

SEQ ID NO: 943 - protein, 296 aa, Cercopithecine herpesvirus
MATSTPAEEETAAAALRRAVAGDRDLVGVAEAISHQALLRMACEVRQATRHTVRFTATGVVRVNVTPDHRLHFVLDGCPDDALIASDAYFARCRDQSAHRGFAFAVVLAREDHVHSLCVPPLVLPHRLSVFWPEHLEDFELACLLMYLENCPRAHATASAFVKISAWLAALGRRTSPFDRVRCLLLRSCQWMLNTLMFMVHVEPFDDQYVLPHWCMARYLLANNPPPILTALFRAGPSRVFRLPVQPRASLECVAYNPQGVLAAGWASEDFRAGLVSWWSSDAPKTQTSALFYRLV

SEQ ID NO: 944 - protein, 95 aa, Vaccinia virus
MNPKHWGRAVWTIIFIVLSQAGLDGNIEACKRKLYTIVSTLPCPACRRHATIAIEDNNVMSSDDLNYIYYFFIRLFNNLASDPKYAIDVSKVKPL

SEQ ID NO: 945 - protein, 133 aa, Vaccinia virus
MAEWHKIIEDISKNNKFEDAAIVDYKTTKNVLAAIPNRTFAKINPGEIIPLITNRNILKPLIGQKYCIVYTNSLMDENTYAMELLTGYAPVSPIVIARTHTALIFLMGKPTTSRRDVYRTCRDHATRVRATGN

SEQ ID NO: 946 - protein, 281 aa, Lake Victoria marburgvirus
MQQPRGRSRTRNHQVTPTIYHETQLPSKPHYTNYHPRARSMSSTRSSAESSPTNHIPRARPPSTFNLSKPPPPPKDMCRNMKIGLPCADPTCNRDHDLDNLTNRELLLLMARKMLPNTDKTFRSPQDCGSPSLSKGLSKDKQEQTKDVLTLENLGHILSYLHRSEIGKLDETSLRAALSLTCAGIRKTNRSLINTMTELHMNHENLPQDQNGVIKQTYTGIHLDKGGQFEAALWQGWDKRSISLFVQAALYVMNNIPCESSISVQASYDHFILPQSQGKGQ

SEQ ID NO: 947 - protein, 934 aa, Human adenovirus
MATPSMMPQWAYMHIAGQDASEYLSPGLVQFARATDTYFSMGNKFRNPTVAPTHDVTTDRSQRLMLRFVPVDREDNTYSYKVRYTLAVGDNRVLDMASTFFDIRGVLDRGPSFKPYSGTAYNSLAPKGAPNTSQWIVTTGEDNATTYTFGIASTKGDNITKEGLEIGKDITADNKPIYADKTYQPEPQVGEESWTDIDGTNEKFGGRALKPATKMKPCYGSFARPTNIKGGQAKNRKVTPTEGDVEAEEPDIDMEFFDGREAADAFSPEIVLYTENVNLETPDSHVVYKPGTSDGNSHANLGQQAMPNRPNYIGFRDNFVGLMYYNSTGNMGVLAGQASQLNAVVDLQDRNTELSYQLLLDSLGDRSRYFSMWNQAVDSYDPDVRIIENHGVEDELPNYCFPLDGIGPGNKYQGIKPRDTAWEKDTKVSTANEIAIGNNQAMEINIQANLWRSFLYSNVALYLPDVYKYTPTNITLPANTNTYEYMNGRVVSPSLVDSYINIGARWSLDPMDNVNPFNHHRNAGLRYRSMLLGNGRYVPFHIQVPQKFFAVKNLLLLPGSYTYEWNFRKDVNMVLQSSLGNDLRTDGATISFTSINLYATFFPMAHNTASTLEAMLRNDTNDQSFNDYLSAANMLYPIPANATNIPISIPSRNWAAFRGWSFTRLKTKETPSLGSGFDPYFVYSGSIPYLDGTFYLNHTFKKVSIMFDSSVSWPGNDRLLSPNEFEIKRTVDGEGYNVAQCNMTKDWFLVQMLANYNIGYQGFYIPEGYKDRMYSFFRNFQPMSRQVVDEVNYTDYKAVTLPYQHNNSGFVGYLAPTMRQGEPYPANYPYPLIGTTAVKSVTQKKFLCDRTMWRIPFSSNFMSMGALTDLGQNLLYANSAHALDMTFEVDPMDEPTLLYLLFEVFDVVRVHQPHRGVIEAVYLRTPFSAGNATT

SEQ ID NO: 948 - protein, 426 aa, Vaccinia virus
MTSSADLTNLKELLSLYKSLRFSDSAAIEKYNSLVEWGTSTYWKIGVQKVANVETSISDYYDEVKNKPFNIDPGYYIFLPVYFGSVFIYSKGKNMVELGSGNSFQIPDDMRSACNKVLDSDNGIDFLRFVLLNNRWIMEDAISKYQSPVNIFKLASEYGLNIPKYLEIEIEEDTLFDDELYSIIERSFDDKFPKISISYIKLGELRRQVVDFFKFSFMYIESIKVDRIGDNIFIPSVITKSGKKILVKDVDHLIRSKVREHTFVKVKKKNTFSILYDYDGNGTETRGEVIKRIIDTIGRDYYVNGKYFSKVGSAGLKQLTNKLDINECATVDELVDEINKSGTVKRKIKNQSAFDLSRECLGYPEADFITLVNNMRFKIENCKVVNFNIENTNCLNNPSIETIYRNFNQFVSIFNVVTDVKKRLFE

SEQ ID NO: 949 - protein, 616 aa, Human adenovirus
MDYFLPLRNIWNRVREFPRASTTAAGITWMSRYLYGYHRLMLEDLAPGAPATQRWPLYRQPPPHFLVGYQYLVRTCNDYVFDSRAFSRLRYSEVVQPGLQTVNWSLMANCTYTINTGAYHRFVDMDDFQDTLTRVQQAILAERVVADLALVQPLRGVGVTRMEDSASASDDIERLMHDYYKNLSRCQGQAWGMAERLRIQQAGPKDLVLLATIRRLKNAYFNYIISNRNSNSVHRAATCLSLPCDCDWLDAFLERFSDPVDLDALTSPTPQLIRCIVSALSLPNGDPPHYREMTGGVFTLRPRERGRAVTETMRRRRGEMIERFVDRLPVRRRRRRAPPPPPPPEEEIEEVVMEEEEEDEAPGDFEREVRATIAELIRLLEDELTVSARNAQFFNFAVDFYEAMERLEAIGDISEMPLRRWIMYFFVTEHIATTLNYLFQRLRNYAVFARHVELNLAQVVMRARDADGDVVYSRVWNESGLGAFSQLMGRISNDLAATVERAGRGDLQEEEIEQFMSEIAYQDNSGDVQEILRQPAVNDAEIDSVELSFRFKVTGPVVFTQRRQIQDVNRRVVAHASALRAQHRDLPERHADVPLPPLPAGPEPPLPPGARPRHRF

SEQ ID NO: 950 - protein, 412 aa, Human cytomegalovirus
MDTIIHNSTRNNTPPHINDTCNMTGPLFAIRTTEAVLNTFIIFVGGPLNAIVLITQLLTNRVLGYSTPTIYMTNLYSTNFLTLTVLPFIVLSNQWLLPAGVASCKFLSVIYYSSCTVGFATVALIAADRYRVLHKRTYARQSYRSTYMILLLTWLAGLIFSVPAAVYTTVVMHHDANDTNNTNGHATCVLYFVAEEVHTVLLSWKVLLTMVWGAAPVIMMTWFYAFFYSTVQRTSQKQRSRTLTFVSVLLISFVALQTPYVSLMIFNSYATTAWPMQCEHLTLRRTIGTLARVVPHLHCLINPILYALLGHDFLQRMRQCFRGQLLDRRAFLRSQQNQRATAETNLAAGNNSQSVATSLDTNSKNYNQHAKRSVSFNFPSGTWKGGQKTASNDTSTKIPHRLSQSHHNLSGV

SEQ ID NO: 951 - protein, 70 aa, Molluscum contagiosum virus
MFQYQLAPPRRCAGCATNFVAYLQEDRERMRAALLANPRKLSALRRFLALARTRTLSLAPLDPELRRVLS

SEQ ID NO: 952 - protein, 129 aa, Vaccinia virus
MELVNIFLETDAGRVKFAIKNTDDVCASELINKFVELLSEYIHIDQSEFYLVVKDKDIFYFKCDRGSISIVNNEFYVFDEPLLFVKDFTNVTGVEFIVTETMPCRIIPKNNHAVISVVTNHKFYNGLSL

SEQ ID NO: 953 - protein, 1006 aa, Vaccinia virus
MDVRCINWFESHGENRFLYLKSRCRNGETVFIRFPHYFYYVVTDEIYQSLSPPPFNARPLGKMRTIDIDETISYNLDIKDRKCSVADMWLIEEPKKRSIQNATMDEFLNISWFYISNGISPDGCYSLDEQYLTKINNGCYHCDDPRNCFAKEIPRFDIPRSYLFLDIECHFDKKFPSVFINPISHTSYCYIDLSGKRLLFTLINEEMLTEQEIQEAVDRGCLRIQSLMEMDYERELVLCSEIVLLRIAKQLLELTFDYVVTFNGHNFDLRYITNRLELLTGEKIIFRSPDKKEAVHLCIYERNQSSHKGVGGMANTTFHVNNNNGTIFFDLYSFIQKSEKLDSYKLDSISKNAFSCMGKVLNRGVREMTFIGDDTTDAKGKAAAFAKVLTTGNYVTVDEDIICKVIRKDIWENGFKVVLSCPTLPNDTYKLSFGKDDVDLAQMYKDYNLNIALDMARYCIHDACLCQYLWEYYGVETKTDAGASTYVLPQSMVFEYRASTVIKGPLLKLLLETKTILVRSETKQKFPYEGGKVFAPKQKMFSNNVLIFDYNSLYPNVCIFGNLSPETLVGVVVSTNRLEEEINNQLLLQKYPPPRYITVHCEPRLPNLISEIAIFDRSIEGTIPRLLRTFLAERARYKKMLKQATSSTEKAIYDSMQYTYKIVANSVYGLMGFRNSALYSYASAKSCTSIGRRMILYLESVLNGAELSNGMLRFANPLSNPFYMDDRDINPIVKTSLPIDYRFRFRSVYGDTDSVFTEIDSQDVDKSIEIAKELERLINNRVLFNNFKIEFEAVYKNLIMQSKKKYTTMKYSASSNSKSVPERINKGTSETRRDVSKFHKNMIKTYKTRLSEMLSEGRMNSNQVCIDILRSLETDLRSEFDSRSSPLELFMLSRMHHSNYKSADNPNMYLVTEYNKNNPETIELGERYYFAYICPANVPWTKKLVNIKTYETIIDRSFKLGSDQRIFYEVYFKRLTSEIVNLLDNKVLCISFFERMFGSKPTFYEA

SEQ ID NO: 954 - protein, 1209 aa, Colorado tick fever virus
MSARTKEKTKDKTKNDEQTVSTEASAADRNDREKSSSSEPEDNAKETLTKKDSSSKKSVDVLAAMIEQKVQMSGSAGLGEFFGRMRPEITDAFFAALEREADVSKVVPSSLSKLDDGQVVDLLSVGEERTLSQSLFQLEVVTSIPHFYQLTAKQIGALGAQGGYLKAYHGEQVYPFIDPVANQFGRGFDLAYVRINTSGQGVELFIDPFDFDKVSCKVGGESLTGIGLSNAVGVDEITYDDVKTPEQMMEFVVLLIAGAAKMGRFCSSGVDARRRRKLFKTWVRRPVSDNFRHVQGWLLEDDYENYPHVPEALTVFSEYQWFAREVADNMTDNGLGTSVQMEDGPNIESFFNRKYREAAICNLDFITAEAHANVMEELQNEKMNVSAYVDLLQSCQMGIFDIEGDTDTIKLKVYMREVEDYEAELTRMMLFPGDQLYVDCLRTAALVSPNIRQFILSVLIQQATSRVGLIELLPVAEMTASLTSRDNISVSHNMALTLAIGEWKELLRLTNPQQICQKIVCDIMAPFVDGLRMEDSLGVPTPSKLVFSLLGAKVALILTPNLYDYNLHLKAHLVTMILSCFFPDQYGALIASRGYGHDVTGNRIDSIRDGERTKKNCRFATYTVLDPIPNGPPDRTRRKWLLMKRVQEWLLRNDLVRRREIRDIIYRPYANVLRLPGQTYLPRRQAAGAPLPCEVLLNDAIAILEEYRTVFHHPNDRNQGPQDRHALTTLSNLLRWYTRGFAEWFHWVYRPLYLQIALHPIIFWSHRLGQGVWRQFPAVREDRERRFDNHLEGVPFDSPVIAAFEPDVALNPFTLRQGADLLGRVHAQGSTFRGGAYDSASVILLSEYEALYRMTDSEGMVDEYIKTLMASRQLLEGLRLVAELSTGELLRDTPILDYIRTAFCEGRFPSHIFFKILNLFGVKINHGVLAQVGERSIEHRLRGDYRVYYPRPGFLDPALEFIPDRIVVVDPVRPSVRRNVKLIMDAVFDPEFGMIKMRKGVTFSLRPTNDLTFSSFHEIPPIQVEMTGNVNYVYDSETARTRAEYDVQVRWEAPGRIITMNLLVTSSYEILSSMEDILGREVRAFSFVVQDVSKFSGIYYDFMLSAVRKEHAIVWFPNLRGILHHHAISIEKVETCFKAAELAQFSSFLSLRPTALIKLNVVQTTNIRGGILPPSVSKPILPCEGVHPSFIFALMSMWRRIGFAGLPSR

SEQ ID NO: 955 - protein, 138 aa, Human adenovirus
MSGSASFEGGVFSPYLTGRLPPWAGVRQNVMGSTVDGRPVQPANSSTLTYATLSSSPLDAAAAAAATAAANTILGMGYYGSIVANSSSSNNPSTLAEDKLLVLLAQLEALTQRLGELSKQVAQLREQTESAVATAKSK

SEQ ID NO: 956 - protein, 60 aa, Variola virus
MDTTFVITPMGMLTITDTLYDDLDISIMDFIGPYIIGNIKTVQIDVRDIKYSDMQKCYFS

SEQ ID NO: 957 - protein, 366 aa, Human adenovirus
MSKRLRVEDDFNPVYPYGYARNQNIPFLTPPFVSSDGFKNFPPGVLSLKLADPITIANGDVSLKVGGGLTLQEGSMTVDPKAPLQLANNKKLELVYVDPFEVSANKLSLKVGHGLKILDDKSAGGLKDLIGKLVVLTGKGIGTENLQNTDGSSRGIGISVRAREGLTFDNDGYLVAWNPKYDTRTLWTTPDTSPNCRIDKEKDSKLTLVLTKCGSQILANVSLIVVSGKYQYIDHATNPTLKSFKIKLLFDNKGVLLPSSNLDSTYWNFRSDNLTVSEAYKNAVEFMPNLVAYPKPTTGSKKYARDIVYGNIYLGGLAYQPVVIKVTFNEEADSAYSITFEFVWNKEYARVEFETTSFTFSYIAQQ

SEQ ID NO: 958 - protein, 102 aa, Human cytomegalovirus
PSSSQALSVPSLSSEKKTASPTCVKTPSFRRCGKTGKYGRAEAKKTHHRHHTLMSTTCRCWSSSIVLYEHLDARVTDDGKTSRRRRCSLGRYALWIYNIYSS

SEQ ID NO: 959 - protein, 303 aa, Molluscum contagiosum virus
MYREEKTLRIDLPPSVASFIKHGFRHHVRWPTLALGVVLANTTTAINEEWLTAVESMPTRKVFHAFVEPVLEGTLHMCVHLKKTQSEGDAYVSMHDFDYYVVRDDGTLSKLKKPKELRETLLHSFLEYRLKNTKSIELVAFSSGTQIREELLTHLAGVLDIEVFTREHANVKVTFPEEPRSTCPFGVIAPRGQLRIFFEAYPWVDTHQHLHAVLRLLERKLVADVRSSQILVTPELDFEGGVSKYDPASRMLLVRDMVTMSIVNFFGARAQLDTYHDFDMRVVDTERFLSALAEAFATLRALV

SEQ ID NO: 960 - protein, 129 aa, Variola virus
MELVNIFLETDAGRVKFVIKNTDDVCASELINKFVELLSEYIHIDQSEFYLVVKDKDIFYFKCDKGSISIVSNEFYVFDEPLLFVKDYTNVTGVEFIVTETMPCRIIPKNNHAVISVVTNHKFYNGLSL

SEQ ID NO: 961 - protein, 117 aa, Vaccinia virus
MRTLLIRYILWRNDNDQTYYNDDFKKLMLLDELVDDGDVCTLIKNMRMTLSDGPLLDRLNQPVNNIEDAKRMIAISAKVARDIGERSEIRWEESFTILFRMIETYFDDLMIDLYGEK

SEQ ID NO: 962 - protein, 720 aa, Banna virus
MELFSDSGSIVENFKERINKLVFDYSLNHGGFRKTYKIQRDRVYYMLGDAHHANLSGKCLMLYNSEKDIFEGLGFKVKGSRINVSKTQILRNYEINFETIIGVEPNGLKTISTAKDVKKLYDIYSYKSSLHPFDDFMAHCINRWGMSIPASLERIIKSEIIKVRSGVLNRNSELYNYIPTVDASFSEMSRGPANVILTDGKLVPDGTCFGPILSKSVEDPRLKNEFRSKGLIMVHDYFILIGESPGPHYKKYTKMTKDNTIFWDPRRTDHKFNNVVSYFKKENIRDVVEYTTDALNRGLKPLVLIDIRKDKPKNLNTPEGAIEWERMVHDDNNLIIDMVNALDKRVTVCAKLRPAFMQVGSMRKLLRPVRILPLPYLRRSTAEFNMFVPNEALMNGNEIYDVTYDDLVRMSSEVFVLKNIIGGLYNMYLKDMHLNLGVVNKSVSLSDGSSAIWSLSNINNERISNFNFNNFLYAAPYSDFATSSVKRHFKGRNYSDWCLNILDEVNLKDGVYLVPLYAIVGGGQITSHDFVNAIITDQEQLIDFTQSERALSTQVVKLVSFILKDSFTAKGLNWTEIDNEIRNRRLSSLSGVGFTVTKMLDGKVLVDGKVVTVSGHMLYILLGSILGLPYGIKKYLKEIELNILKPGSSYERGVGGRVWHGLISHYLAVDCVIDVIDEYMVCTYEDRSKLNVVLRYVKSKLLELGSKYDVYLSVDERLVL

SEQ ID NO: 963 - protein, 325 aa, Human adenovirus
MTKRVRLSDSFNPVYPYEDESTSQHPFINPGFISPNGFTQSPDGVLTLKCLTPLTTTGGSLQLKVGGGLTIDDTDGFLKENISATTPLVKTGHSIGLSLGPGLETNENKLCAKLGEGLTFNSNNICINDNINTLWTGVNPTRANCQIMASSESNDCKLILTLVKTGALVTAFVYVIGVSNDFNMLTTHKNINFTAELFFDSTGNLLTSLSSLKTPLNHKSGQNMATGALTNAKGFMPSTTAYPFNVNSREKENYIYGTCYYTASDHTAFPIDISVMLNQRALNNETSYCIRVTWSWNTGVAPEVQTSATTLVTSPFTFYYIREDD

SEQ ID NO: 964 - protein, 117 aa, Vaccinia virus
MITLFLILCYFILIFNIIVPAISEKMRRERAAYVNYKRLNKNFICVDDRLFSYNFTTSGIKAKVAVDNKNVPIPCSKINEVNNNKDVDTLYCDKDRDDIPGFARSCYRAYSDLFFTT

SEQ ID NO: 965 - protein, 488 aa, Molluscum contagiosum virus
MFSFRVGPKHSVPCRCRRKKKKKKGFFFLPCVRVPGACTKHWLLFFFRVGAGPNNCFSSVGGTGTNKDSLSCECRALTILFRVGGRHNNVLSRVSRRALAFRPREPAARIHEEYEHHLSPWVQPRRHRCRRQAFSRGAGDRAVLCRACGAAGTRRRGTNRCFVACAGQQALGAGARALVWCRARTVALSRACRHEQFFAGQTVVVPGHKTSRVRPSARVVVVQAQRSTRCRGRAQVFCSFTRAGSRHQVPGARARSCFLFSVQAAGPNTGVFCVFCFPLARACTWRRVLVSGHEPGCVLSRVQAPGTNTAVFVFWVLFPPARADAPARTRLFRAGASRFVCVCGHEQSCFLFARLQTHVLVSACVRVCLSHEDNTSTTCSLCSVRADARHRASNHPERASVCVCVCVCTRQRAAVVVCVRTHEHECCLVRSDERRAEHQEERTTRTAGRNNERERRAHSAPSVRSTVTPSPKSTASSPAAPTSRFEAH

SEQ ID NO: 966 - protein, 114 aa, Human cytomegalovirus
SCYYVCVFCFGRYTVPFSGPSVPWRDEKRACFTRWLMPSVVDISHFLKKQHKKKMMWFVVLTVSFSYYRYYRSRERTARENTVFSGTSCRRPSPGRRDVRRERWRTTNTDRWCS

SEQ ID NO: 967 - protein, 243 aa, Molluscum contagiosum virus
MGAAASVQTTVTTLNERISNKLEQSASASATANCNVSIGNIYFGRNHGCNVLVKNMCSANADAQLDAIVKAATEVYNELSEEQKAYAPSLLTAALNIQTNVSTVTKDFETYVKQACKADAVVNNTIKVQNLRVDECSAPSGMLMTFEFINTGTSVGNCAMKALLDVLTKSSDRISGVQNTGTDIRWYVIVAAVVACVLLVLWYAKRMLFTSTQDKIKLILASKPDVHWTTFLDTFFSSAPTVL

SEQ ID NO: 968 - protein, 190 aa, Vaccinia virus
MSKIYIDERSDAEIVCAAIKNIGIEGATAAQLTRQLNMEKREVNKALYDLQRSAMVYSSDDIPPRWFMTTEADKPDADAMADVIIDDVSREKSMREDHKSFDDVIPAKKIIDWKDANPVTIINEYCQITKRDWSFRIESVGPSNSPTFYACVDIDGRVFDKADGKSKRDAKNNAAKLAVDKLLGYVIIRF

SEQ ID NO: 969 - protein, 372 aa, Vaccinia virus
MDKLRVLYDEFVTISKDNLERETGLSASDVDMDFDLNIFMTLVPVLEKKVCAITPTIEDDKIVTMMKYCSYQSFSFWFLKSGAVVKSVYNKLDYVKKEKFVATFRDMLLNVQTLISLNSMYTRLRQDTEDIVSDSKKIMEIVSHLRASTTENAAYQVLQQNNSFIISTLNKILSDENYLLKIIAVFDSKLISEKETLNEYKQLYTISSESLVYGIRCVSNLDISSVQLSNNKYVLFVKKMLPKIILFQNNDINAQQFANVISKIYTLIYRQLTSNVDVGCLLTDTIESAKTKISVEKIKQTGINNVQSLIKFISDNKKEYKTIISEEYLSKEDRIITILQDIVNEHDIKYDNKLLNMRDLIVTFRERYSYKF

SEQ ID NO: 970 - protein, 80 aa, Human immunodeficiency virus
MLSLQILAIVALVVAAIIAIVVWSIVFIEYRKILRQRKIDRLIDRIREREEDSGNESEGDQEELAALERGHLAPWDVDDL

SEQ ID NO: 971 - protein, 57 aa, Human adenovirus
MRHLRFLPQEIISSETGIEILEFVVLCLMMSHLLLIQLPHLLKFRRPHLQTYASPFL

SEQ ID NO: 972 - protein, 281 aa, Vaccinia virus
MDFFNKFSQGLAESSTPKSSIYYSEEKDPDTKKDEAIEIGLKSQESYYQRQLREQLARDNMMAASRQPIQPLQPTIHITPQPVPTATPAPILLPSSTAPTPKPRQQTNTSSDMSNLFDWLSEDTDAPASSLLPALTPSNAVQDIISKFNKDQKTTTPPSTQPSQTLPTTTCTQQSDGNISCTTPTVTPPQPPIVATVCTPTPTGGTVCTTAQQNPNPGAASQQNLDDMALKDLMSSVEKDMHQLQAETNDLVTNVYDAREYTRRAIDQILQLVKGFERFQK

SEQ ID NO: 973 - protein, 304 aa, Molluscum contagiosum virus
MTAIPVTDIANEYAVTTFSEDGYPCNKNYEITSGQMSILRSVHEKLLSHAAETEAFEEDADSGCAPGDACECGAGACECGAGACACGASTPVSPGVPRVDILVSEVETVIERRAHERAGASLPTQTPSLSGVYDREQRMQLLEAEVAALRRRRAEQGSDNLANFTKLLFQKNPARAGTVNKRVVIVNYASMNQVPLALEDLEGVSDEEVDSMYRTIRQYHEVRKKKIVVTNFIIIVINVLEQLLLKLGFDDIKGLSSEVTSELIDVEIGDDCEQIATRLGISNTPALNITLFIVKLFIRRIRIL

SEQ ID NO: 974 - protein, 252 aa, Human herpesvirus
MSLTGLPDIRKKIGQFHHLRIYKQILSLQGNFARLNYFLGDVFPANLRSASVSVFFEVRLGPRIPDCIVLLKSVDAKDEFAFHCYFFEFKTTLGKSTMQSVHHNCIHQAQYLQGLRQLHQSISFLDQYLIADEVLWNVVPVICFFRQWGLKLDFFKKFSGKTKRLSFSFICDLFARSQDGAVQSLLSIPNYTNFRRACQKHTDLYRRRYQKASKSVLTKTSGENRSRASRQVAKNAPKNRIRRTAKKDAKRQ

SEQ ID NO: 975 - protein, 642 aa, Molluscum contagiosum virus
MRTKSPGDGSTRKANRWAGQVQVAATAQPPSMACLYPACARSCCRWSAPCLSTLDADRQPLCGAVARDDVVLLVRANRGSLARIEHLCTARQDDTRALAARLAPHGPWRLSCHHPAGPHAPTRRHAHARHVRGLWRDHGHAARAGPLRGHGAHARACQRQPAGTARAPRLLRRGARCATALQRARVPVRAHDTHLRRLSRAPPLRALLRRLRRAAHARGRLCLQRAQVHRRGLRARARARALQLQLLRRVPVGAAALRATPAPAAVLCYVLLGRRARLASGRRVRVPALALPLRAAFVAARERAASHAAGRVAARAITNAGGNAVAARAPARAAETEIIEGFLRIGVRQKPPRAMYKPVRNLCAPACEFASSLLADTDDDEELSEPDARTLIEHLNCCLEGSAKVLDVSDACIMHMRFGSQQRCYYLTDGDDSDEIFDRFECSRGALYETLEAFFVLCLGGELQVNYSSDRENASVRVAEGEAFFMDVAATHSLASACKEVKMLVLRCQLDTVLAHWGDRVTSSSALVYEKFCGVNFALYRLSCDGTVVRDLLLANRNVYDAPTCQDLGVVHLEQVLAQYQISNCPMPDHVPESPLRICERELAAEDSEAVFAGIRPRHAVSIALFPCKVYAVQIAYGVLFT

SEQ ID NO: 976 - protein, 737 aa, Vaccinia virus
MISVTDIRRAFLDNECHTITKAFGYLHEDNAIALIKIGFHPTYLPKVLYNNVVEFVPEKLYLFKPRTVAPLDLISTITKLKNVDKFASHINYHKNSILITGDKSLIVKCMPYMIISDDDIRFIREQFVGTNSIEYILSFINKESIYRMSYQFSENEIVTIINRDHFMYEPIYEHQVLDSDFLKTMLDRYGIVPINSGIIDELCPEAIIEILMAVVRPRDAIRFLDIVNKNQLTEDSVKNYIINDIRRGKIDYYIPYVEDFLEDRTEDLGIYANIFFEDAIDITKLDITKTELEHISKYMNYYTTYIDHIVNIILQNNYIDILASIIDYVQDVLTEELCIRIVCESTNPVPVTSLPIHSTLVMVMCIQMKYVDIVEFLDEIDIDTLIEKGADPITEYTFTTRWYNKHNDLITLYIKKYGFCPMMMKRLMFEYPLTKEASDHLLKTMDENRGAIMFFPRTICTLPYLLCCNYKLIQKPIPFKEENRNIVYKKNNRVLCFDSLENSAFKSLIKIDSIPGLKTYNMKDITYEKSNNIICVRFIPQESIHNEERRIKLQLFDIARLASYGLYYIPSRYLSSWTPVVNMIEGREYTNPQKIECLVILDLFSEEFIEYQNLGNAVSNKYELEYTISNYQAAINCLMSTLLIYLVLGSIRSISKTEDFVLSILNIFYKGLKINELLSEPVSGVCIELNKIKDRASSGDSSFIFLKKNELSKTLSLCEKVCVETILDNNQSFKSSK

SEQ ID NO: 977 - protein, 259 aa, Vaccinia virus
MKRLETIRHMWSVVYDHFDIVNGKECCYVHMHSSNQNPIPSTVKTNLYMKTMGSCIQMDSMEALEYLSELKESGGWSPRPEMQEFEYPDGVEDTESIERLVEEFFNRSELQAGKSVKFGNSINVKHTSVSAKQLRTRIRQQLPSILSSFANTEGGYLFIGVDNNTHKVFGFTVGYDYLRLVENDIEKHIKRLCVVYFCEKKEDIKYTCRFIKVYKPGDEATSTYVCAIKVERCCCAVFADWPESWYMDTNGIKKYSPDE

SEQ ID NO: 978 - protein, 81 aa, Human immunodeficiency virus
MQPLQILAIVALVVAGIIAIIVWSIVLIEYRKILRQRKIDRLIDKIRERAEDSGNESEGDQEELSALVERGHLAPWDINDL

SEQ ID NO: 979 - protein, 198 aa, Human adenovirus
MRANREELDLLPPVGGMAVDVMEVELPATRRAFMLVLVQTAAVLAAIHGMHLMNELYLTSFDEKFQWKIEAWRLYLALYYVVCIGMTIFCLDGGHADEPSREASPDLGAAGAELEDESAQAGAVQGPETLRSQVSRQCQEIDLHDLFEGVREVQMVLDLHGSVGGDVNGLQGSVPLGRYHRALVFPFGRRWLCCFLHV

SEQ ID NO: 980 - protein, 334 aa, Variola virus
MDGVIVYCLNALVKHGEEINHIKNDFMIKPCCERVCEKVKNVHIDGQSKNNTVIADLPYLDNAVLDVCKSVYKKNVSRISRFANLIKIDDDDKTPTGVYNYFKPKDAISVIISIGKDKDVCELLIASDKACACIELNSYKVAILPMNVSFFTKGNASLIILLFDFSINAAPLLRSVTDNNVVISRHKRLHGEIPSSNWFKFYISIKSNYCSILYMVVDGSVMYAIADNKTHTIISKNILDNTTINDECRCCYFEPQIKILDRDEMLNGSSCDMNRHCIMMNLPDIGEFGSSILGKYEPDMIKIALSVAGNLIRNQDYIPGRRGYSYYVYGIASR

SEQ ID NO: 981 - protein, 2133 aa, Molluscum contagiosum virus
MSIEAMSSADGLSGPGFTISIIYALEIAPAGKVNFYRHTWSGRIMSPRGDLTARCAVPLVALLTILFAALFAAGSGTEMACYRKIGLYSLTGEMHRAQETRVVSVLDVDSRVLAEMETLQEGFHWDALRSNASARFRSACENTSTPQVSYVVRQGLTLLTRANCSDDGNSTDILSGLNGTLLVTVCNMTLELQQQDCPATMQGLELSVHEGSVTLTLVSGLVSSVNPFVPSENATRCLMAVPTKITYNGSCENIPLSTPTSMPEGTPPGASADTLKNTESTPGNASADERPLASTPAPLSTPASFFATTLEISSGTRAVTVAWNLASTPTLTPASMSFEEQHVVWTNLTVEDNCTIMVGIQVKSSAQSACERADMETVLAVVGVLTEYTEALHRLNLSSDNETKDYYECMMLGSPSCFLQGLRQVALHNVMQNLQAKALTRARRTRSLHDDNAHCLHRHFGMGPGVGDHCENIEEPLARVRRSDPPRPTPPRVRRPRPGGVDTPQRPLPKPRPGGGSTPPIPPTKPKSLVEKVSESLGMKPVIGPGVQEVQLGAHGSDGSVVGSDGLTTSLREQLRKAVEQRAPTLPTDMNPDDLEKARIRWREGGGHLQGLCSEAVRYKEESIRSAAGKAHDWSKRKHRWGQRRGFHGTRGGGHGDEDSDLEDVEQVRQQLKEMGIGPLGRQRSSGSSSDLEDVEEVRQQLKEMGIGPLGKRKSSSSSNSDFEHLQDTQQQLVKKGLFRGGRQSGPTRFDESVWKKLDQLGGPAHAPVFSPQVHGSPPGDVVAPLETRMSGDPGHLDVHSSGRHTPTFPNLDTGTRVSVAETTYAVLGGGGGPRPPRRLRERQREGGDGVGDYAELDWGEQRHAGRRRGHGRGVQDGSGPLPPIPGEKSPTGRQLGDRPLPPTPTSRHEDSPGTRLGRKICKRSLDSLLCGMLGTRPDSDSVPHDPVYESVQGPYSLLGEHNRPPATNPNYREPVYSTLGMPTGPEAPSKTGGGPSAPPTELMPADTSSPRMKQLAREENRLEKFLSAVSLSTYLSSAQTQLREVMMVQPHMPHGMAVATMISSIVSTAGGTLALAGASNPVTAAAGLALQGVGMLIDIGTSLYYLIKGQSRPPPVDPVTEKFSTYARHMAQASAGARLCLMPDSDLRLTLAYRHSHFESAAGEKGALAFADTPMTLVYYLRSQYIVYNTRVTVTCPIGTLRLLEGDISAYAVLESVGEDGASHYALPGIMELLSNHPNASFTCGSEVGARFVPFDRELGDMQLLRVAAPGEPKETESIPSNVCDLFPLKRFYLLTDGCPHDRSQTAITYVTCGTLLRMASWEPVRNRWVLLNPFFRSADEFIQLFTFSQYDFSGSTIRLHELDAPEAFCSQRVSSTCYWPEPMMLEDVTACETRIRKIHVELATVGGSGYTSFVLTCPPGSTPFHVSNVSVVAIPQNTRRTAVRYAATTQTSILVSCVHNTNPAYKSDIVVLTFSTQGLRSRFSDMEKWTQRKMLFDSSAWAMPLRSRTCKRPEENTLCHLAYSVSQQRAEYHLQVQTLPEQRLHEYYHGELDALTLQLTRTHFASDLHLRVDVSFLASAYRTPENLWKHAAKQMRTFSAITITLYPCASMVGMFDIKYEQVLARLLYLGTKDHGNGQNLTFHALNSLNDSRHARHGHELHADYSCRAHLDIPEKTVSLHCPPLSLPKAPFNDTGVDGICVVVTSSRDHCAVQSEEGVREGYTSYEAETPFLSCGAYVQEYAVRENFCYYERTLRIPLAHDYDPCSTAMVLGYAHVWLETRLVSPPYVQEFGYDPSRNEYANRSLFEQLQDLQRQYEELLKHSSNPAVRMANQLAATLTEEARAIFRINADSQLMQTAFEADEERLRELEARIENTMQDIFLNTMSYQELDALRRSAFSTRCCVLDGTSVRKYFPLEHYLCGNYGDYIVTAGEYRFLLINHTLVDEAYYNATEQPWLTCYEITLVPVSTEEQRARVEEALFLDALESVLQDLFNRYDENLTVILHNPGLGKHDEEEDGGTSNDNGPGGTGLSVPLGVSLATAMLVLLAFLLARRGYAAKCMGKYSPLKAQQKQVRDFWKQVCERYSAREEAGISGELARSASFYERRSSDGGHFARRSSSALLLRQEETSA

SEQ ID NO: 982 - protein, 257 aa, Human herpesvirus
MVRPTEAEVKKSLSRLPAARKRAGNRAHLATYRRLLKYSTLPDLWRFLSSRPQNPPLGHHRLFFEVTLGHRIADCVILVSGGHQPVCYVVELKTCLSHQLIPTNTVRTSQRAQGLCQLSDSIHYIAHSAPPGTEAWTITPLLIFKNQKTLKTVYSESPGAFPTPVHTTEGKLCAFLTARENADIRKVLSKVPKKPKMDRGGKILGPTPGKRAVYSQAHHGRNKKGRPWTAQPTRAKSRTKDKGTPAFPRAGPACSGP

SEQ ID NO: 983 - protein, 126 aa, Molluscum contagiosum virus
MKDVLLLLGKPLCPVCALANTILSHLEDKYPILRVNILSLFTKKNVVDVLGMRTYELVSALMEFFGGEYVMVLKMQPDTGEVAFVPFKEYLVVGQISMDALDYDQLERSVEDAPYGVWPPRKKSVV

SEQ ID NO: 984 - protein, 737 aa, Variola virus
MISVTDIRRAFLDNECHTITKAFGYLHEDKAIALIKIGFHPTYLPKVLYNNVVEFVPEKLYLFKPRTVAPLDLISTITKLKNVDKFASHINYHKNSILITGDKSLIVKCMPYMIISDDDIRFIREQFVGTNSIEYILSFINKESIYRMSYQFSENEIVTIINRDHFMYEPIYEHQVLDSDFLKTMLDKYGIVPINSGIIDELYPEAIIEILMAVVRPRDAIRFLDIVNKNQLTEDSVKNYIINDIRRGKIDYYIPYVEDFLEDRTEDLGIYANIFFEDAIDITKLDITKTELEHISKYINYYTTYIDHIVNIILQNNYIDILASIIDYVQDVLTEELCIRIVCESTNPVPVTSLPIHSTLVMVMCIQMKYVDIVEFLDEIDIDTLIEKGADPITEYTFTTRWYNKHNDLITLYIKKYGFCPMMMKRLMFEYPLTKEASDHLLKTMDENRGAIMFFPRTICTLPYLLCCNYKLIQKPIPFKEENRNIVYKKTNRVLCFDLLENSAFKSLIKIDSIPGLKTYNMKDITYEKSNNIICVRFIPQESIHNEERRIKLQLFDIARLASYGLYYIPSRYLSSWTPVVNMIEGREYTNPQKIECLVILDLFSEEFIEYQNLGNAVSNKYELEYTISNYQAAINCLMSTLLIYLVLGSIRSISKTENFVLSILNIFYKGLKINELLSEPVSGVCIELDKIKDRASSGDSSFIFLKKNELSKTLSLCEKVCVETILDNNQSFKSSK

SEQ ID NO: 985 - protein, 177 aa, Vaccinia virus
MSSIRFIACLYLISIFGNCHEDPYYQPFDKLNITLDIYTYEDLVPYTVDNDTTSFVKIYFKNFWITVMTKWCAPFIDTVSVYTSHDNLNIQFYSRDEYDTQSEDKICTINVKARCKHLTKREVTVQQEAYRYSLSSDLSCFDSIDLEIDLIETNSTDTTVLKSYELMLPKRAKSIHN

SEQ ID NO: 986 - protein, 448 aa, Hendra virus
MDKLDLVNDGLDIIDFIQKNQKEIQKTYGRSSIQQPSTKDRTRAWEDFLQSTSGEHEQAEGGMPKNDGGTEGRNVEDLSSVTSSDGTIGQRVSNTRAWAEDPDDIQLDPMVTDVVYHDHGGECTGHGPSSSPERGWSYHMSGTHDGNVRAVPDTKVLPNAPKTTVPEEVREIDLIGLEDKFASAGLNPAAVPFVPKNQSTPTEEPPVIPEYYYGSGRRGDLSKSPPRGNVNLDSIKIYTSDDEDENQLEYEDEFAKSSSEVVIDTTPEDNDSINQEEVVGDPSDQGLEHPFPLGKFPEKEETPDVRRKDSLMQDSCKRGGVPKRLPMLSEEFECSGSDDPIIQELEREGSHPGGSLRLREPPQSSGNSRNQPDRQLKTGDAASPGGVQRPGTPMPKSRIMPIKKGAQTRSLNMLGRKTCLGRRVVQPGMFADYPPTKKARVLLRRMSN

SEQ ID NO: 987 - protein, 174 aa, Human adenovirus
MAFVTALIIANIVTVAHGQTIIHITLGHNHTLVGPPITSEVIWTKLGSVDYFDIICNKTKPIFVICNRQNLTLINVSKIYNGYYYGYDRSSSQYKNYLVRITQPKLTVPTMTIIKMANKALENFTSPTTPNEKNIPNSMIAIIAAVALGMALIIICMFLYACCYKKFQHKQIHY

SEQ ID NO: 988 - protein, 162 aa, Variola virus
MDEGYYSGNLESVLGYVSDMHTKLASITQLVIAKIETIDNDILNNDIVNFIMCRSNLNNPFISFLDTVYTIIDQEIYQNELINSLDDNKIIDCIVNKFMSFYKDNLENIVDAIITLKYIMNNPDFKTTYAEVLGSRIADIDIKQVIRENILQLSNDIRERYL

SEQ ID NO: 989 - protein, 476 aa, Molluscum contagiosum virus
MSKEPDLTKLKELLRLQQQLARAEPADTTRYNALVDWARRTYWHVGVRECGLQSELLVEPFEQHRTRAFTLAPGTYTFSALHFGTALLYAGGQLLELGSGAARGAPEELHARCRAMLARYADVEALRFCNFRERYVLEQVHARARPAPHVWLPLAAAEGLSVAQHTRVRVERDTEFSEEYFGVLVRYLRARDAALHVEAVCCVRDGRAERWRIAFGRPVYSCVDRLELEQVGPNRFLPCLITFAGDRVLARDLEHLVQAHVRVGAFIVMRKLRTATVLVAAAEASTETRATALRRIMQALGGEYFANGAYVSRLAQVSVEQLADRMGVSLPCATPAKLCAALREDAKLRERVLRTSDFDMACEYLSYQRADVVAVINSMKFKIEQRKIVSFELESAGCLRDDPTLETIYSHFCQFVAVFNFLAEVRLALECDASGVKELPGGEARNAAESAVAGHGPDAEPREETEPESEESSAEK

SEQ ID NO: 990 - protein, 389 aa, Human herpesvirus
MAFTGDELARMLQFKDKMISSAGLALKFEKVVQEAMASGIVLQHITCIKVRICDNSDILSDRQLRSLLINGLYPFEGRMSMFGVTEEWEGASAAPERQVVFLLSSTGQVLGYEDGVVFYLSPTFSDFWTTAMEFSCQNAILSNFIAQKSRDEYIDQFQKYFTRMRHTPIFLTGVLPRRFQKVESSACVEEDARASMRPIQCDSFGVKDTFCRPTEELLQPSANKDVGGKVCMSLSCREDNSARHCTIYGLTETRGIKIMFSRHTQTDRSEVMCNAATQTGDVVDNSSETLFLGKNLVHQSILETEVKTTAKNTFDVSNPRIDSVYDTTVFGAMATDDVGCENVQGGASLAQEKPLKGYCITATPSECKPNIHWLKSPEKTVQESAAVLR

SEQ ID NO: 991 - protein, 367 aa, Cercopithecine herpesvirus
MAGRAPGRRLAPPCPPVGPSARGPAGGAGSPAAPGIVELDTCADAVASVANSIFVWRLVRGDERIKIFRCVTALTGALCQVAVPPPDPRRALFCEVFLYLTRPRALRLPPGAFFAIFLFNRERRYCATTHVRSVNHPLAPSLRALTFTCLKAAAPPEESPDPAAERLDATPLAFELAGPFLVPAEVPRDPSACCALGPGAWWHFPSGQIYCWAMDEALGELCPPGSRARHLGWLLARLTNHPGGCGTCAPQPHADSVNALWESAAVAEACPCVAPCMWAKMAQRVLAIEGDGSLRQLLFARPVDAVVLLGSTRGPRIAAHLHEVVGGQRGAERIRPQATGWRLCALSSYASRLFATSCPTIARVVAR

SEQ ID NO: 992 - protein, 989 aa, Human spumaretrovirus
MAPPMTLQQWIIWKKMNKAHEALQNTTTVTEQQKEQIILDIQNEEVQPTRRDKFRYLLYTCCATSSRVLAWMFLVCILLIIVLVSCFVTISRIQWNKDIQVLGPVIDWNVTQRAVYQPLQTRRIARSLRMQHPVPKYVEVNMTSIPQGVYYEPHPEPIVVKERVLGLSQILMINSENIANNANLTQEVKKLLTEMVNEEMQSLSDVMIDFEIPLGDPRDQEQYIHRKCYQEFANCYLVKYKEPKPWPKEGLIADQCPLPGYHAGLTYNRQSIWDYYIKVESIRPANWTTKSKYGQARLGSFYIPSSLRQINVSHVLFCSDQLYSKWYNIENTIEQNERFLLNKLNNLTSGTSVLKKRALPKDWSSQGKNALFREINVLDICSKPESVILLNTSYYSFSLWEGDCNFTKDMISQLVPECDGFYNNSKWMHMHPYACRFWRSKKNEKEETKCRDGETKRCLYYPLWDSPESTYDFGYLAYQKNFPSPICIEQQKIRDQDYEVYSLYQERKIASKAYGIDTVLFSLKNFLNYTGTPVNEMPNARAFVGLIDPKFPPSYPNVTREHYTSCNNRKRRSVDNNYAKLRSMGYALTGAVQTLSQISDINDENLQQGIYLLRDHVITLMEATLHDISVMEGMFAVQHLHTHLNHLKTMLLERRIDWTYMSSTWLQQQLQKSDDEMKVIKRIARSLVYYVKQTHSSPTATAWEIGLYYELVIPKHIYLNNWNVVNIGHLVKSAGQLTHVTIAHPYEIINKECVETIYLHLEDCTRQDYVICDVVKIVQPCGNSSDTSDCPVWAEAVKEPFVQVNPLKNGSYLVLASSTDCQIPPYVPSIVTVNETTSCFGLDFKRPLVAEERLSFEPRLPNLQLRLPHLVGIIAKIKGIKIEVTSSGESIKEQIERAKAELLRLDIHEGDTPAWIQQLAAATKDVWPAAASALQGIGNFLSGTAQGIFGTAFSLLGYLKPILIGVGVILLVILIFKIVSWIPTKKKNQ

SEQ ID NO: 993 - protein, 60 aa, Vaccinia virus
MSHVRWRNIWQEHNDGVYSIGKECIDNIYEDNHTVDEFYKIDSVSDVDDAEHISPITKKP

SEQ ID NO: 994 - protein, 115 aa, Human adenovirus
MGETWFLTPNGQSSPGSWNARPSAGPAARMPTPRNRYFSRPSSTPLKVCTAPRAAPPPRASCAPRATPRRGWTMTPWSNATWPTRRAKTGSASAPAGPASSAPWPARSPERTPSP

SEQ ID NO: 995 - protein, 350 aa, Human adenovirus
MSKRKYKEEMLQVIAPEIYGPPVKDEKKPRKIKRVKNNKKEEDDDDGLVEFVREFAPRRRVQWRGRKVRQVLRPGTTVVFTPGERSSTTFKRSYDEVYGDDDILEQAADRLDEFAYGKRTRSSPKEEAVSIPLDHGNPTPSLKPVTLQQVLPVPARRGVKREGEDLYPTMQLMVPKRQRLEDVLEKMKVDPDIQPEVKVRPIKEVAPGLGVQTFDIKIPTESMEVQTEPAKPTTTSIEVQTEPWTPAPVVAPSTTRRSRRKYGPASLLMPNYALHPSIIPTPGYRGTRYYRNRSNTSRRRKPPASRTRSRRRRNTASKVTPAALVRRVYRDGRAEPLTLPRARYHPSITT

SEQ ID NO: 996 - protein, 235 aa, Varicella-zoster virus; identical to SEQ ID NO: 787

SEQ ID NO: 997 - protein, 73 aa, Molluscum contagiosum virus
MFRKFVVDSFGRSAPAALRLLLLRAHVIAASSRHRCTRMSGAGERSVPAALLLPRARVVASSCFFFFVACTEK

SEQ ID NO: 998 - protein, 389 aa, Human herpesvirus
MAFTGDELARMLQFKDKMISSAGSALRFEKVVQEAMASGIVLQHITCIKVRICDNSDILSDRQLRCLLINGLYPFEGRMSMFGVTEEWEGASAAPERQVVFLLSSTGQVLGYEDGVIFYLSPTFSDFWTTAMEFSCQNAILSNFIAQKSRDEYSDQFQKYFTRMRHTPISLTGVLPRRFQKVESGACVEEDARASMRPIQSDSFGAKGPFCWPTEELLQPSAKKDVGGTVCMALSCQEDNSARHCTIYGLTKTPGIKIMLSRHTQTDRSEAMCDAATQTEDVVDNSSETLFLGGNLVHQSILETEVQATAKNTFDVSDPRIDSVYDTTVVGAMATDDVGCKHVQGGASLAQEKPLKGYCIIATPSECKPNIHWLKSPENAVHESAAVLR

SEQ ID NO: 999 - protein, 1186 aa, Cercopithecine herpesvirus
MPRPRFYYDAASQDPADGPPRTPDPEEPDDDDDDGEDGGDAFPAAAAAAVSPRQLALLASMVEETARALSPPSSAGPATPPAPRRDSVWVIDAAAPPPTPGGAPADDALAELAEVAESAERGAAAADSARPDGREADAGSASESGSESESESESEDSGPDRGPTPPSPGGPDDDDDGEDDADADGDGGAGAGGAAPSRAPGPGSSASDSEDSEDPDPSPPASPPPAARRPPSSAASAGRSERRRARAAVAGRDATGRFTAAPPRAVPLDADEASGAFYARYRDGYASGEPWPGAEPPPPGRVLYGGLGDSRPGLWGAPEVDEARRRYEAAGAPAPVWAPELGDAARQYALITRLLFAPDREAMGWLQNPRVTAGDVELDRACFEASGARRNSSSFITGTVARAVPHLGYAMAAGRFGWGLAHAAAAVAMSRRYDRAQKGFLITSLRRAYAPLLARENAAAAGAAAAAAAAPEPDAAAVPAVPAGYGAAGVIAAQRRLAAALSDEGPAGAGEDGPAGAAGEDEDDDDDDAAAAAAAECLTACRAVLEALAEGYGGDLAAVPGLAAARAVPPPRGPAAAPPRPRLWLRELRRTRDALVLMRLRGDLRVAGGAEAAVAAVRAVSLVAGAAAPLLARGPRQVRSAGAAAADLLFQNQSLRPLLADADAGGAARPPARKRKSSSPARPPAAAAACPPARKKSRPGAAAPPPGPPAPGPRPRPAALTARPPAGPDPRGGWRRVPPGPSHTPAPSAAALEAYCAPRVVAELTDHPLFPEAWRAALAFDPRALASLAARCGPPEPGSGRAFGPPRASGPLRRAAAWMRQVADPEDVRVLVLYAPLPGEELGGASPAPPAWTDARGGLSFLLAALGNRLCGPDTAAWAGNWTGPPDVSALGAQGVLLLSTRDLAFAGAVEYLGLLAAAAGRRLVVVDAVPPEEWPADGPAVARRHVYLPCAVLPAAQCDVRWPAARDLRRAVLASGRVFGPGVFARVEAACARLYPDAPPPRLGRGANVRYRARTRLGPDTPVPLPPREYRRAVLPALDGRAADSPAREAAAAGAPDFRRGEAHSHRACARWGLAAPLRPVYLALDRDAARAGPDALPPALRAFCARALLEPDPDAAPLVLRADADADPAAAPRVRWAAGRGDTLLADDDDAAAVEVAAAASPARGASPDWDWDWERGPGRPEDW

SEQ ID NO: 1000 - protein, 488 aa, Human T-cell leukemia virus
MGKFLATLILFFQFCPLILGDYSPSCCTLTVGVSSYHSKPCNPAQPVCSWTLDLLALSADQALQPPCPNLVSYSSYHATYSLYLFPHWIKKPNRNGGGYYSASYSDPCSLKCPYLGCQSWTCPYTGAVSSPYWKFQQDVNFTQEVSHLNINLHFSKCGFSFSLLVDAPGYDPIWFLNTEPSQLPPTAPPLLSHSNLDHILEPSIPWKSKLLTLVQLTLQSTNYTCIVCIDRASLSTWHVLYSPNVSVPSPSSTPLLYPSLALPAPHLTLPFNWTHCFDPQIQAIVSSPCHNSLILPPFSLSPVPTLGSRSRRAVPVAVWLVSALAMGAGVAGRITGSMSLASGKSLLHEVDKDISQLTQAIVKNHKNLLKIAQYAAQNRRGLDLLFWEQGGLCKALQEQCCFLNITNSHVSILQERPPLENRVLTGWGLNWDLGLSQWAREALQTGITLVALLLLVILAGPCILRQLRHLPSRVRYPHYSLINPESSL

SEQ ID NO: 1001 - protein, 86 aa, Vaccinia virus
MDTDTDTDTDTDTDTDTDVTNVEDIMNEIDREKEEILKNVEIENNKNINKNHPNEYIREALVINTSSNSDSIDKEVIECISHDVGI

SEQ ID NO: 1002 - protein, 121 aa, Human adenovirus
MSAAALALAAAEEGGASAAAPDASGKSKKGARPCFRRNLQAGSCMTGRQTPVRRSPAGPRLEPGVLRLNPWKITLRLQGASHLMLSLSSLTAYAARGQWPKKLAQQPPRLEGSQKERSPVV

SEQ ID NO: 1003 - protein, 117 aa, Human adenovirus
MRVCLRMVVEGALRDLFVMCGLDLPQELTRIIEGWKAENYLGMVQECNMMFEELENAPSFGILLFLDVRVEALLEATVEHLENRISFDLAVLFHQHSGGDRCHLRDLQFEVLRDRLE

SEQ ID NO: 1004 - protein, 176 aa, Epstein-Barr virus
MARRLPKPTLQGRLEADFPDSPLLPKFQELNQNNLPNDVFREAQRSYLVFLTSQFCYEEYVQRTFGVPRRQRAIDKRQRASVAGAGAHAHLGGSSATPVQQAQAAASAGTGALASSAPSTAVAQSATPSVSSSISSLRAATSGATAAASAAAAVDTGSGGGGQPHDTAPRGARKKQ

SEQ ID NO: 1005 - protein, 513 aa, Molluscum contagiosum virus
MDALKIREWEGDKDPRMKSIQAFGLMVENLWRKPLSERSCLSRAERKCIRNVIRDYMRSVEPLSSPSGMPVQWLLEECRDQNPYFQRLIQYDKGIFLSRLSELRAYYNVETVGQYVLFMVFCILRVEFLHGSEFVGLDVNSSRQELRHRLTHAFVSLLTYGTYINHYENSAYMFIGAPMYWAQYVDYYWAYKHLYENAFVELLPSTKMYRAYFEYVRATIRHTGSEVRSVMLRFCGETWAFSLSAPEFILEALCYTVADTLEKTDDSRVLLYVEELHSYDSEPTYLYHELGSTFREVLNSGVPGTRHVQLATHRDISAISIEHADGRLDNRDWYFPVYKLVTPSLCGQQLVLQQYVQPEPARRAVQIDLKVTASTEKEEGESGLPDDEFPEETFPGSPELPEDEPPSRRVPDDFYIPDSEQQRVQIIQRQIRWLEHYLRNASKCCHENSRIESRLRHHLETMRQYSVLLSRKTDIQSGLVTEVWPSPHAVDGSWPRGLERPPKALLSTDLLAS

SEQ ID NO: 1006 - protein, 772 aa, Human herpesvirus
MQHTGNCETLIVNSCFGSTCARSIPVFIDSCDLTAEVSRDEETRLARSMPVVLEKIESIIEKIFQTSGPNIVHDKDRAKIALCRLLLGPVAVPCFCEEWDTNDYLSKSGCKCIGPILYIHTSRCRCSDIPVFKFSIMKDYYASHVFRGLLSLKEWNTHLPNVLCTCELSMSDRYVATVYPKQNSIYLEYYPYFLCYLCRHLTVIEIEQCTNDLISLLGPKVAQRVIIHFKLLFGFRHKPHIGTVDSWFWENFFMLELHKLWLTVVKHNRVTTDFFNVVYEKIQNYKQYAIKTLRMSSKAVPAIQRLCLAKFKQQLLYLNIKVTVKKNKREMCLNGFVYGKTLYVVESSQLIFRNLLLLYYDYSLPDECKTNEENVLTAHYIRVISRLSFKRSRSALPPGVRPDFIFVAQQPKRKELPNVPGGIDFAEITSVRHGAVTLNAFNTNKVMNLKATISKRANFVYHRIPKTMTHSFVMYKHTFKEPAFTVSTFVSNDDLDMSSLNINIRGPYCDFLYALGVYKMHVSIRDLFLPAFVCNSNNSVDLQGLENQDVVRNRKKKVYWITNFPCMISNANKVNVGWFKAGTGIIPRVSGEDLQNVLLQELNNVREIPGLVFDMDLHQLLVLLEQRNLHQIPFLVKQFLIFLRLGLLMGYGHSRRNKVHDIMLHLISNGLFDFNKNSVANTKIKHGCALVGTRLANNVPKIIARQKKMKLDHMGRNANSLAVLRFIVKSGEQKNKTVFIKLLEYLAETSTAINTRNEVARLLQTLTAKVKT

SEQ ID NO: 1007 - protein, 68 aa, Molluscum contagiosum virus
MMLTDAAMLLICVAIVALLLYAVYRRGRETQTTPKRTVDELVENDAIFRDELTPDQIRALHRFFTGAS

SEQ ID NO: 1008 - protein, 491 aa, Human T-cell leukemia virus
MGKFCLYFCLIYILFSASSGNPSRCTLFIGASSYHSDPCGSDHPRCTWRLDLFSLTRDQSLSPPCPDLVTYSQYHRPYSLYVFPHWITKPNRRGLGYYSASYSDPCAIQCPYLGCQSWTCPYTGPVSSPHWKYSSDLNFTQEVSSISLHLHFSKCGSSFSFLLDAPGYDPVWFLSSQATQAPPTPAPLIQDSDLQHILEPSIPWSSKILNLILLTLKSSNYSCMVCVDRSSLSSWHVLYDPLKAPNPPDPKAQSILRPSLAIPASNVTPPFPWTHCYRPLLQAISSEHCNNSVVLPPFSLSPLPNVSRPRKRRAVPIAIWLVSALAAGTGIAGGVTGSLSLASSKSLLREVDQDIDHLTQAIVKNHDNILRVAQYAAQNRRGLDLLFWEQGGLCKAIQEQCCFLNISNTHVSVLQERPPLEKRVITGWGLNWDLGLSQWAREALQTGITLLALFLLLIVVGPCVIRQLQALPSRLQHRSQPYSLLNYETNL

SEQ ID NO: 1009 - protein, 434 aa, Vaccinia virus
MGIKNLKSLLLENKSLTILDDNLYKVYNGIFVDTMSIYIAVANCVRNLEELTTVFIKYVNGWVKKGGHVTLFIDRGSIKIKQDVRDKRRKYSKLTKDRKMLELEKCTSEIQNVTGFMEEEIKAEMQLKIDKLTFQIYLSDSDNIKISLNEILTHFNNNENVTLFYCDERDAEFVMCLEAKTHFSTTGEWPLIISTDQDTMLFASTDNHPKMIKNLTQLFKFVPSAEDNYLAKLTALVNGCDFFPGLYGASITPNNLNKIQLFSDFTIDNIVTSLAIKNYYRKTNSTVDVRNIVTFINDYANLDDVYSYVPPCQCTVQEFIFSALDEKWNNFKSSYLETVPLPCQLMYALEPRKEIDVSEVKTLSSYIDFENTKSDIDVIKSISSIFGYSNENCNTIVFGIYKDNLLLSINSSFYFNDSLLITNTKSDNIINIGY

SEQ ID NO: 1010 - protein, 534 aa, Human papillomavirus
MIYILACCAGNVKNANVFIFQMAVWLPGPNRFYLPPQPIQRTLNTEEYVRRTSTFLHAATDRLLTVGHPFYNITNADGKEVVPKVSSNQFRAFRVRFPNPNTFAFCDKSLFNPDKERLVWGIRGIEVSRGQPLGIGVTGNPFFNKFDDAENPYNGINKNNITDQGSDSRLSIAFDPKQTQLLIVGAKPAKGEYWDVAATCENPPLTKADDKCPALELKSSYIEDADMSDIGLGNLNFSTLQRNKSDAPLDIVDSICKYPDYLQMIEELYGDHMFFYVRREALYARHIMQHAGKMDAEQFPTSLYIDSSVEGEKLNSLQRTDRYFMTPSGSLVATEQQLFNRPFWLQRSQGHNNGILWHNEAFVTLVDTTRGTNFTISVPEGDASSYNNSKFFEFLRHTEEFQLAFILQLCKVDLTPENLAYIHTMDPSIIEDWHLAVTSPPNSVLEDHYRYILSIATKCPSKDADDTSTDPYKDLKFWEVDLRDRMTEQLDQTPLGRKFLFQTGITQSSSNKRVSTQSTALTTYRRPTKRRRKA

SEQ ID NO: 1011 - protein, 91 aa, Human adenovirus
MIPRNFFFTILICAFNVCATFTAVATASPDCIGPFASYALFAFVTCICVCSIVCLVINFFQLVDWIFVRIAYLRHHPEYRNQNVAALLRLI

SEQ ID NO: 1012 - protein, 122 aa, Variola virus
MIYLYTADNVIPKDGLQGAFVDKDGTYDKVYILFTVTIGSKRIVKIPYIAQMCLNDECGPSSLSSHRWSTLLKVELECDIDGRSYSQINHSKTIKQIMIRYYMYSLIVLFQVRIMYLFYEYH

SEQ ID NO: 1013 - protein, 406 aa, Molluscum contagiosum virus
MRALVLLAVVAALSVCACYLLYLCRYRLRRCLRRDLQGRSRGKRRHRAFCCADSDGTPDGASCGTVCKEPCDASRLQEPDLGLLCGALAPFQTLGHSLGCCRRARDKLFPASVTFRVDAGTRMNSASGASSSVSSSVSSSVSSSLSGSARAGFCSSASSSSSSADSNSASSRARVSARSSGCSGRDKRTLKSRDEMSRMGNAAGNSAGQDPADRSGCDQEHVYADACVASEALYARVASSSAETLYVNASAAAHAEALLCTEARVRAVLALSRGMCMLRKDLQSTLGVLCARARALSDGDGGSERSSSESDEDTGTLEGVRSEMRQAEVSLALCGETELAEDVAEFRGYLDEVRHDILRLRLRDSSASELARGMLLARDAIDAVEDVSASTESVLLGVDQFMRAQK

SEQ ID NO: 1014 - protein, 531 aa, Human cytomegalovirus
MMAAAVVRAEVRRQRREERKKMAAARTTEDPPENHVVADVARGTGAVTRSSSSSLVVSSSSASGSDESSSASPLSFPVSSPSTAVRSPGSAGVSTSLCSVERMVELSAQSPAADFSVSEAWRFEEAVNMALVACEAVSPYDRFRLIETPDENFLLVTNVIPRESAEVPVLDSSSSGGDSGPEDKKKNVGNKTAGEKNGGGSRAKRRRRRRAPKNDAATPSFLRRHDVLERFAAAAKPLPSLCVRDYALRNADRVTYDGELIYGSYLLYRKAHVELSLSSNKVQHVEAVLRQVYTPGLLDHHNVCDVEALLWLLYCGPRSFCARDTCFGREKNGCPFPALLPKLFYEPVRDYMTYMNLAELYVFVWYRGYEFPAPTPQATTAGGGGGSGGGGGAGACAVETSASAGRVDDAGDEVHLPLKPVSLDRLREVLQAVRGRFSGREVPAWPASSRTCLLCALYSQNRLCLDLARDEARTVSYSPIVIQDCAAAVTDVTLSHILPGQSTVSLFPVYHVGKLLDALSLNDAGLITLNL

SEQ ID NO: 1015 - protein, 882 aa, Cercopithecine herpesvirus
MARVGGDASVSSPPEQPREPSVQFRDEAFLNFTSMHGIQPIIERVRELAEHRLEAARVPRLQWFRDVAALETPAGLPLREFPFAVYLITGNAGSGKSTCVQTLNEVLDCVVTGATRIAAQNMYVKLSGAFLSRPINTIFHEFGFRGNHVQAQVGQHPYTLASNPASVEDLQRRDLTYYWEVIADITRRAVAAGGGAEDGRNEFRALATLESTMGLGEGALTRLAAFTHGALPAFTRSNIVVIDEAGLLGRHLLTAVVYCWWMTNALYHTPQYAAGLRPVLVCVGSPTQTASLESTFEHQKLRCSIRQSENVLTYLICNRTLREYARLPRSWAIFINNKRCVEHEFGNLMKALEYGLPLTEEHMQFVDRFVVPESFITNPANLPGWTRLFSSHKEVSAYMARLHAHLKVAREGEFVVFSLPVLTFVSAKAFDEYRELTHQPALTVEKWIAANAGRITNYSQSQDQDAGRARLEVHSKQQLVVARNDVTYVLNSQIAVTTRLRKLVFGFSGTFRSFEAVLRDDSFVKTQGEMLVEFAYQFLSRLIFGGLIHFYNFLLRPGLDAARRARAYERMGALTRELLSLGATGAGPATPGDQAASGGGESASAAPGAERAFDFKTLGARATDAEFPEDDLDVVFAGLNEQELDLFYCHYTVEQPETTAAVHAQFGLLKRAFLGRYHILRELFGEAFEGAPFGTYVDNVTFRGCEVMIGSMRGGLMSVALQTDSYTLTGFTYARVYAFAEEVRRRHAAGGLAELLEESPLPYVVLRDQHGFMSVVNTNISEFVESVESRELAMATNADYGISSMLAMTITRSQGLSLDKVAICFTPGNLRLNSAYVAMSRTTSSEFLRMNLNPLRERHERDDVISEHILSALRDPDVLIVY

SEQ ID NO: 1016 - protein, 486 aa, Human T-cell leukemia virus
MGNVFFLLLFSLTHFPLAQQSRCTLTIGISSYHSSPCSPTQPVCTWNLDLNSLTTDQRLHPPCPNLITYSGFHKTYSLYLFPHWIKKPNRQGLGYYSPSYNDPCSLQCPYLGCQAWTSAYTGPVSSPSWKFHSDVNFTQEVSQVSLRLHFSKCGSSMTLLVDAPGYDPLWFITSEPTQPPPTSPPLVHDSDLEHVLTPSTSWTTKILKFIQLTLQSTNYSCMVCVDRSSLSSWHVLYTPNISIPQQTSSRTILFPSLALPAPPSQPFPWTHCYQPRLQAITTDNCNNSIILPPFSLAPVPPPATRRRRAVPIAVWLVSALAAGTGIAGGVTGSLSLASSKSLLLEVDKDISHLTQAIVKNHQNILRVAQYAAQNRRGLDLLFWEQGGLCKAIQEQCCFLNISNTHVSVLQERPPLEKRVITGWGLNWDLGLSQWAREALQTGITILALLLLVILFGPCILRQIQALPQRLQNRHNQYSLINPETML

SEQ ID NO: 1017 - protein, 90 aa, Vaccinia virus
MKKIMVGGNTMFSLIFTDHGAKIIHRYANNPELREYYELKQNKIYVEAYDIISNAIVKHDRIHKTIESVDDNTYISNLPYTIKYKIFEQQ

SEQ ID NO: 1018 - protein, 473 aa, Human papillomavirus
MRHKRSAKRTKRASATQLYKTCKQAGTCPPDIIPKVEGKTIAEQILQYGSMGVFFGGLGIGTGSGTGGRTGYIPLGTRPPTATDTLAPVRPPLTVDPVGPSDPSIVSLVEETSFIDAGAPTSVPSIPPDVSGFSITTSTDTTPAILDINNTVTTVTTHNNPTFTDPSVLQPPTPAETGGHFTLSSSTISTHNYEEIPMDTFIVSTNPNTVTSSTPIPGSRPVARLGLYSRTTQQVKVVDPAFVTTPTKLITYDNPAYEGIDVDNTLYFSSNDNSINIAPDPDFLDIVALHRPALTSRRTGIRYSRIGNKQTLRTRSGKSIGAKVHYYYDLSTIDPAEEIELQTITPSTYTTTSHAASPTSINNGLYDIYADDFITDTSTTPVPSVPSTSLSGYIPANTTIPFGGAYNIPLVSGPDIPINITDQAPSLIPIVPGSPQYTIIADAGDFYLHPSYYMLRKRRKRLPYFFSDVSLAA

SEQ ID NO: 1019 - protein, 83 aa, Human adenovirus
MTVIQTPESHPQQLDCESALKDYPNAFLCITDPRLARFETVWNVESKTMSICNGIQMFKAVRGERLVYSVKWEGGGKITTRIL

SEQ ID NO: 1020 - protein, 353 aa, Vaccinia virus
MDIFKELIVKHPDENVLISPVSILSTLSILNHGAAGSTAEQLSKYIENMNENTPDDNNDMDVDIPYCATLATANKIYGSDSIEFHASFLQKIKDDFQTVNFNNANQTKELINEWVKTMTNGKINSLLTSPLSINTRMTVVSAVHFKAMWKYPFSKHLTYTDKFYISKNIVTSVDMMVGTENNLQYVHINELFGGFSIIDIPYEGNSSMVIILPDDIEGIYNIEKNITDEKFKKWCGMLSTKSIDLYMPKFKVEMTEPYNLVPILENLGLTNIFGYYADFSKMCNETITVEKFLHTTFIDVNEEYTEASAVTGVFTINFSMVYRTKVYINHPFMYMIKDTTGRILFIGKYCYPQ

SEQ ID NO: 1021 - protein, 2513 aa, Sindbis virus
  misc_feature (1897)..(1897): Xaa can be any naturally occurring amino acid
MEKPVVNVDVDPQSPFVVQLQKSFPQFEVVAQQVTPNDHANARAFSHLASKLIELEVPTTATILDIGSAPARRMFSEHQYHCVCPMRSPEDPDRMMKYASKLAEKACKITNKNLHEKIKDLRTVLDTPDAETPSLCFHNDVTCNMRAEYSVMQDVYINAPGTIYHQAMKGVRTLYWIGFDTTQFMFSAMAGSYPAYNTNWADEKVLEARNIGLCSTKLSEGRTGKLSIMRKKELKPGSRVYFSVGSTLYPEHRASLQSWHLPSVFHLNGKQSYTCRCDTVVSCEGYVVKKITISPGITGETVGYAVTHNSEGFLLCKVTDTVKGERVSFPVCTYIPATICDQMTGIMATDISPDDAQKLLVGLNQRIVINGRTNRNTNTMQNYLLPIIAQGFSKWAKERKDDLDNEKMLGTRERKLTYGCLWAFRTKKVHSFYRPPGTQTCVKVPASFSAFPMSSVWTTSLPMSLRQKLKLALQPKKEEKLLQVSEELVMEAKAAFEDAQEEARAEKLREALPPLVADKGIEAAAEVVCEVEGLQADIGAALVETPRGHVRIIPQANDRMIGQYIVVSPNSVLKNAKLAPAHPLADQVKIITHSGRSGRYAVEPYDAKVLMPAGGAVPWPEFLALSESATLVYNEREFVNRKLYHIAMHGPAKNTEEEQYKVTKAELAETEYVFDVDKKRCVKKEEASGLVLSGELTNPPYHELALEGLKTRPAVPYKVETIGVIGTPGSGKSAIIKSTVTARDLVTSGKKENCREIEADVLRLRGMQITSKTVDSVMLNGCHKAVEVLYVDEAFACHAGALLALIAIVRPRKKVVLCGDPMQCGFFNMMQLKVHFNHPEKDICTKTFYKYISRRCTQPVTAIVSTLHYDGKMKTTNPCKKNIEIDITGATKPKPGDIILTCFRGWVKQLQIDYPGHEVMTAAASQGLTRKGVYAVRQKVNENPLYAITSEHVNVLLTRTEDRLVWKTLQGDPWIKQPTNIPKGNFQATIEDWEAEHKGIIAAINSPTPRANPFSCKTNVCWAKALEPILATAGIVLTGCQWSELFPQFADDKPHSAIYALDVICIKFFGMDLTSGLFSKQSIPLTYHPADSARPVAHWDNSPGTRKYGYDHAIAAELSRRFPVFQLAGKGTQLDLQTGRTRVISAQHNLVPVNRNLPHALVPEYKEKQPGPVKKFLNQFKHHSVLVVSEEKIEAPRKRIEWIAPIGIAGADKNYNLAFGFPPQARYDLVFINIGTKYRNHHFQQCEDHAATLKTLSRSALNCLNPGGTLVVKSYGYADRNSEDVVTALARKFVRVSAARPDCVSSNTEMYLIFRQLDNSRTRQFTPHHLNCVISSVYEGTRDGVGAAPSYRTKRENIADCQEEAVVNAANPLGRPGEGVCRAIYKRWPTSFTDSATETGTARMTVCLGKKVIHAVGPDFRKHPEAEALKLLQNAYHAVADLVNEHNIKSVAIPLLSTGIYAAGKDRLEVSLNCLTTALDRTDADVTIYCLDKKWKERIDAALQLKESVTELKDEDMEIDDELVWIHPDSCLKGRKGFSTTKGKLYSYFEGTKFHQAAKDMAEIKVLFPNDQESNEQLCAYILGETMEAIREKCPVDHNPSSSPPKTLPCLCMYAMTPERVHRLRSNNVKEVTVCSSTPLPKHKIKNVQKVQCTKVVLFNPHTPAFVPARKYIEVPEQPTAPPAQAEEAPEVVATPSPSTADNTSLDVTDISLDMDDSSEGSLFSSFSGSDNSITSMDSWSSGPSSLEIVDRRQVVVADVHAVQEPAPIPPPRLKKMARLAAARKEPTPPASNSSESLHLSFGGVSMSLGSIFDGETARQAAVQPLATGPTDVPMSFGSFSDGEIDELSRRVTESEPVLFGSFEPGEVNSIISSRSAVSFPLRKQRRRRRSRRTEYXLTGVGGYIFSTDTGPGHLQKKSVLQNQLTEPTLERNVLERIHAPVLDTSKEEQLKLRYQMMPTEANKSRYQSRKVENQKAITTERLLSGLRLYNSATDQPECYKITYPKPLYSSSVPANYSDPQFAVAVCNNYLHENYPTVASYQITDEYDAYLDMVDGTVACLDTATFCPAKLRSYPKKHEYRAPNIRSAVPSAMQNTLQNVLIAATKRNCNVTQMRELPTLDSATFNVECFRKYACNDEYWEEFARKPIRITTEFVTAYVARLKGPKAAALFAKTYNLVPLQEVPMDRFVMDMKRDVKVTPGTKHTEERPKVQVIQAAEPLATAYLCGIHRELVRRLTAVLLPNIHTLFDMSAEDFDAIIAEHFKQGDPVLETDIASFDKSQDDAMALTGLMILEDLGVDQPLLDLIECAFGEISSTHLPTGTRFKFGAMMKSGMFLTLFVNTVLNVVIASRVLEERLKTSRCAAFIGDDNIIHGVVSDKEMAERCATWLNMEVKIIDAVIGERPPYFCGGFILQDSVTSTACRVADPLKRLFKLGKPLPADDEQDEDRRRALLDETKAWFRVGITGTLAVAVTTRYEVDNITPVLLALRTFAQSKRAFQAIRGEIKHLYGGPK

SEQ ID NO: 1022 - protein, 533 aa, Human cytomegalovirus
MMAAAVVRAEVRRQRREERKKMASARTTEDPPENHVVADVACGTGAVTRSSSSSLVVSSSSASGSDESSSASPLSFPVSSPSTAVRSPGSAGVSTSLCSVERMVELSAQSPAADFSVSEAWRFEEAVNMALVACEAVSPYDRFRLIETPDENFLLVTNVIPRESAEVPVLDSSSSGGDSGPEDKKKNVGNKTAGEKNGGGSRAKRRRRRRAPKNDAATPSFLRRHDVLERFAAAAEPLPSLCVHDYALRNADRVTYDGELIYGSYLLYRKAHVELSLSSNKVQHVEAVLRQVYTPGLLDHHNVCDVEALLWLLYCGPRSFCARDTCFGREKNGCPFPALLPKLFYEPVRDYMTYMNLAELYVFVWYRGYEFPAPTPQATTAGGGGGGGSGGGGGAGACAVETSASAGRVDDAGDEVHLPLKPVSLDRLREVLQAVRGRFSGREVPAWPASSRTCLLCALYSQNRLCLDLARDEARTVSYSPIVIQDCAAAVTDVTLSHILPGQSTVSLFPVYHVGKLLDALSLNDAGLITLNL

SEQ ID NO: 1023 - protein, 458 aa, Cercopithecine herpesvirus
MKAKPPIPGVQAALPETAGSPPLHRLLRPTGARRDGPISSTLATPRQTATTLWLLGLDPLGARPAPGDASDGGSERAVRALLQGIVRAGRPAAAPSPFRHHLTRQITLTDLCQPDADRAGTVILALRHPSDFPALARQHAPPGRRVEWLGEAWGRVLEASTMGSCRAESGCTRAGLVSLNFLVAACAPAYDAREAAEAVRTHVTANYRGARAGARLDALAECLRAMVHTHVFPHETLRFFGSLASWVTQDELASVTAVCSGPHEAAHTGSPGRPRSAITVPACAFIDLDAELCFGRPGAAFLYLAFTYRQRRDQELCCVYVIKSQLPPRGLESALERVFGRLRTTNTIHGIEDMAAPPPERNADFPLAALAADPRAPRCSPGQVEAPQYAARLYRWRPDLRGRPTGRTCAYAAFAELGIMPDDTPRCMRHTERFGSVSVPVVLLEGVVWRPGEWRVCS

SEQ ID NO: 1024 - protein, 853 aa, Human immunodeficiency virus
MRARGIERNCQNWWKWGIMLLGILMTCSAADNLWVTVYYGVPVWKEATTTLFCASDAKSYETEAHNIWATHACVPTDPNPQEIALENVTENFNMWKNNMVEQMHEDIISLWDQSLKPCVKLTPLCVTLNCSDELRNNGTMGNNVTTEEKGMKNCSFNVTTVLKDKKQQVYALFYRLDIVPIDNDSSTNSTNYRLINCNTSAITQACPKVSFEPIPIHYCAPAGFAILKCRDKKFNGTGPCTNVSTVQCTHGIRPVVSTQLLLNGSLAEEEVIIRSENLTNNAKNIIAHLNESVKITCARPYQNTRQRTPIGLGQSLYTTRSRSIIGQAHCNISRAQWSKTLQQVARKLGTLLNKTIIKFKPSSGGDPEITTHSFNCGGEFFYCNTSGLFNSTWNISAWNNITESNNSTNTNITLQCRIKQIIKMVAGRKAIYAPPIERNILCSSNITGLLLTRDGGINNSTNETFRPGGGDMRDNWRSELYKYKVVQIEPLGVAPTRAKRRVVEREKRAIGLGAMFLGFLGAAGSTMGARSVTLTVQARQLMSGIVQQQNNLLRAIEAQQHLLQLTVWGIKQLQARILAVERYLKDQQLLGIWGCSGKHICTTNVPWNSSWSNRSLNEIWQNMTWMEWEREIDNYTGLIYSLIEESQTQQEKNEKELLELDKWASLWNWFSITQWLWYIKIFIMIIGGLIGLRIVFAVLSLVNRVRQGYSPLSFQTLLPAPRGPDRPEGTEEEGGERGRDRSVRLLNGFSALIWDDLRSLCLFSYHRLRDLILIAVRIVELLGRRGWDILKYLWNLLQYWSQELRNSASSLFDAIAIAVAEGTDRVIEIIQRACRAVLNIPRRIRQGLERSLL

SEQ ID NO: 1025 - protein, 382 aa, Vaccinia virus
MNNFVKQVASKSLKPTKKLSPSDEVISLNECIISFNLDNFYYCNDVLFTKPINTPEDVLKSLLIMESFAYEKMIIKGLIKILISRAYINDIYFTPFGWLTGVDDDPETHVVIKIIFNSSLISIKSQVIEYLKPYNVNNLSVLTTEKELSINTFNVPDSIPMSIISFFPFDTDFILVILFFGVYNDSYCGISYISPKERLPYIIEILKPLVSEINMLSDEIGRTSSIRIFNSNSVKKFPTNTLTSICEIVYSFDESSFPTPKTFTPLNASPYIPKKIVSLLDLPSNVEIKAISRGGVDFITHINNKRLNTILVIAKDNFLKNSTFSGTFIKENIIWKGIYTYRIIKSSFPVPTIKSVTNKKKICKKHCFVNSQYTTRTLSHIL

SEQ ID NO: 1026 - protein, 529 aa, Human papillomavirus
MVQILFYILVIFYYVAGVNVFHIFLQMSVWRPSEATVYLPPVPVSKVVSTDEYVSRTSIYYYAGSSRLLTVGHPYFSIKNTSSGNGKKVLVPKVSGLQYRVFRIKLPDPNKFGFPDTSFYNPETQRLVWACTGLEIGRGQPLGVGISGHPLLNKFDDTETSNKYAGKPGIDNRECLSMDYKQTQLCILGCKPPIGEHWGKGTPCNNNSGNPGDCPPLQLINSVIQDGDMVDTGFGCMDFNTLQASKSDVPIDICSSVCKYPDYLQMASEPYGDSLFFFLRREQMFVRHFFNRAGTLGDPVPGDLYIQGSNSGNTATVQSSAFFPTPSGSMVTSESQLFNKPYWLQRAQGHNNGICWGNQLFVTVVDTTRSTNMTLCAEVKKESTYKNENFKEYLRHGEEFDLQFIFQLCKITLTADVMTYIHKMDATILEDWQFGLTPPPSASLEDTYRFVTSTAITCQKNTPPKGKEDPLKDYMFWEVDLKEKFSADLDQFPLGRKFLLQAGLQARPKLKRPASSAPRTSTKKKKVKR

SEQ ID NO: 1027 - protein, 145 aa, Human adenovirus
MLRHFLGLFKTMQAMLPVILILLLPCIALASTATRATPEQLRKCKFQQPWSFLDCYHEKSDFPTYWIVIVGIINILSCTFFSITIYPTFNFGWNSPNALGYPQEPDEHIPLQHIQQPLALVEYENEPQPSLPPAISYFNLTGGDD

SEQ ID NO: 1028 - protein, 222 aa, Vaccinia virus
MNHCLLAISAVYFKAKWLTPFEKEFTSDYPFYVSPTEMVDVSMMSMYGELFNHASVKESFGNFSIIELPYVGDTSMMVILPDKIDGLESIEQNLTDTNFKKWCNSLDAMFIDVHIPKFKVTGSYNLVDTLVKSGLTEVFGSTGDYSNMCNLDVSVDAMIHKTYIDVNEEYTEAAAATCALVSDCASTITNEFCVDHPFIYVIRHVDGKILFVGRYCSPTTNC

SEQ ID NO: 1029 - protein, 1057 aa, Molluscum contagiosum virus
MSQSRASSTSSRAMPMLALEMIPSPAELCHLAHCSTSCADMARRVLLRLYPEVVCGADSEAELPAIYFDAVRACVSEYYPLVCDEYVWQHEGLLPLREFVLRCRLVREVSPRSQSPEARALDLRADARLREFPKLEPRTPVPALQPEPFATASHVSEGLASRLEGATPFVPCPLFQLEEAVPATSEGSSQEGFVRAHREEEHALRAFADRARTGSKHVRVREPARTHESAHAPCQQYAAFPRVCQESVPRTLVPTDARHVPLVPPARSASRRASEHTPFEQTVHETYPGTAFADHSGELEAVRARAQGSAALADAARPEYAVLAGTSRLELSEETVLVRTEEVAGPLSRRDEIMSFRTEEAAGTLLCENTPFFPEEAAGGLSCQDEAVPFRIESAVSLARAEGTFRIEEVFAPPREKEGSVSLSDGEALTRGVEAVVPLAQRGHKATLSRLEKVVRERMEHAVVRACPNNVPLANGTSDSCARPDEVPRASEGAERRACPEEDATGNHHDVLDSAELRAKDATRSLREPVPREDAARPLGEPVPREDAARPLGEPVPREDAARPLGEPVPREDAARPLGEPVPREDVTRQNGQRSPPAARSVLVPVPVRPAAGALVPRSRGAPYTPSAFVQVTPAWAGPVTLDIYECASSVSSPGELAVLLLHKVFQELFDARQLRRCYSCYGDGRTHCLDPARLQLIRHCVALCFPSMSDDGEWVRECVSRVNSELTGEELMDVDSGSAEEDDEETEETEEESRRVTRACSPRAQPLRKSVRSTRGLRRSQIRARELAPINFDTLCIPPPDFYVPSCVPLPTRAHLRKMYGASRSIYNFAVRMLVYMFPELFTAENLHTHFNCYGSMGKRRLDPLRLRLLRHYVQLLHPAARNERVWITKFLACLDERCRRRCARTQARTPRATRSSFAPIRAVSVPAPDFYVPAQYLISAKRVKELARRSLCPGHFAAQLTVMLFPELFSSCTERQKFSCAGSDEHLRLDPVRVRLIRHYVRAVCLPGAFERTWEAECVPSIDARCQQPGLRRHELLKRSICAEEDEDSSDIIYE

SEQ ID NO: 1030 - protein, 78 aa, Human cytomegalovirus
MTLFCRTANSTAGYVDMNVCIGMIGVVCFVFGVFILIFCSTLKAFYVRQKTYHLLGTESDDEETTVWEKRRMESDTDF

SEQ ID NO: 1031 - protein, 79 aa, Human herpesvirus
MLTGSRGSYTHTHTHKLGEVNTEISLTHNPLHAYHHLKMVTTKTGNSLSSFSFHSQPMCSTRGSTTTKETVETVPLSRP

SEQ ID NO: 1032 - protein, 863 aa, Human immunodeficiency virus
  misc_feature (572)..(572): Xaa can be any naturally occurring amino acid
MIVTMKAMEKRNKKLWTLYLAMALITPCLSLRQLYATVYAGVPVWEDATPVLFCASDANLTSTEKHNIWASQACVPTDPTPYEYPLHNVTDDFNIWKNYMVEQMQEDIISLWDQSLKPCVQMTFLCVQMECTNIAGTTNENLMKKCEFNVTTVIKDKKEKKQALFYVSDLMELNETSSTNKTNSKMYTLTNCNSTTITQACPKVSFEPIPIHYCAPAGYAIFKCNSTEFNGTGTCRNITVVTCTHGIRPTVSTQLILNGTLSKGKIRMMAKDILEGGKNIIVTLNSTLNMTCERPQIDIQEMRIGPMAWYSMGIGGTAGNSSRAAYCKYNATDWGKILKQTAERYLELVNNTGSINMTFNHSSGGDLEVTHLHFNCHGEFFYCNTAKMFNYTFSCNGTTCSVSNVSQGNNGTLPCKLRQVVRSWIRGQSGLYAPPIKGNLTCMSNITGMILQMDNTWNSSNNNVTFRPIGGDMKDIWRTELFNYKVVRVKPFSVAPTRIARPVISTRTHREKRAVGLGMLFLGVLSAAGSTMGAAATTLAVQTHTLLKGIVQQQDNLLRAIQAQQQLLRLSXWGIRQLRARLLALETLLQNQQLLSLWGCKGKLVCYTSVKWNRTWIGNESIWDTLTWQEWDRQISNISSTIYEEIQKAQVQQEQNEKKLLELDEWASIWNWLDITKWLWYIKIAIIIVGALVGVRVIMIVLNIVKNIRQGYQPLSLQIPNHHQEEAGTPGRTGGGGGEEGRPRWIPSPQGFLPLLYTDLRTIILWTYHLLSNLASGIQKVISYLRLGLWILGQKIINVCRICAAVTQYWLQELQNSATSLLDTLAVAVANWTDGIIAGIQRIGTGIRNIPRRIRQGLERSLL

SEQ ID NO: 1033 - protein, 147 aa, Vaccinia virus
MFNMNINSPVRFVKETNRAKSPTRQSPGAAGYDLYSAYDYTIPPGERQLIKTDISMSMPKFCYGRIAPRSGLSLKGIDIGGGVIDEDYRGNIGVILINNGKCTFNVNTGDRIAQLIYQRIYYPELEEVQSLDSTNRGDQGFGSTGLR

SEQ ID NO: 1034 - protein, 508 aa, Human papillomavirus
MYNVFQMAVWLPAQNKFYLPPQPITRILSTDEYVTRTNLFYHATSERLLLVGHPLFEISSNQTVTIPKVSPNAFRVFRVRFADPNRFAFGDKAIFNPETERLVWGLRGIEIGRGQPLGIGITGHPLLNKLDDAENPTNYINTHANGDSRQNTAFDAKQTQMFLVGCTPASGEHWTSSRCPGEQVKLGDCPRVQMIESVIEDGDMMDIGFGAMDFAALQQDKSDVPLDVVQATCKYPDYIRMNHEAYGNSMFFFARREQMYTRHFFTRGGSVGDKEAVPQSLYLTADAEPRTTLATTNYVGTPSGSMVSSDVQLFNRSYWLQRCQGQNNGICWRNQLFITVGDNTRGTSLSISMKNNASTTYSNANFNDFLRHTEEFDLSFIVQLCKVKLTPENLAYIHTMDPNILEDWQLSVSQPPTNPLEDQYRFLGSSLAAKCPEQAPPEPQTDPYSQYKFWEVDLTERMSEQLDQFPLGRKFLYQSGMTQRTATSSTTKRKTVRVSTSAKRRRKA

SEQ ID NO: 1035 - protein, 261 aa, Human adenovirus
MRHLRFLPQEIISSETGIEILEFVVNTLMGDDPEPPVQPFDPPTLHDLYDLEVDGPEDPNEEAVNGFFTDSMLLAADEGLDINPPPETLVTPGVVVESGRGGKKLPDLGAAEMDLRCYEEGFPPSDDEDGETEQSIHTAVNEGVKAASDVFKLDCPELPGHGCKSCEFHRNNTGMKELLCSLCYMRMHCHFIYSPVSDDESPSPDSTTSPPEIQAPAPANVCKPIPVKPKPGKRPAVDKLEDLLEGGDGPLDLSTRKLPRQ

SEQ ID NO: 1036 - protein, 1356 aa, Human coronavirus
MLLIIFILPTTLAVIGDFNCTNFAINDLNTTVPRISEYVVDVSYGLGTYYILDRVYLNTTILFTGYFPKSGANFRDLSLKGTTYLSTLWYQKPFLSDFNNGIFSRVKNTKLYVNKTLYSEFSTIVIGSVFINNSYTIVVQPHNGVLEITACQYTMCEYPHTICKSKGSSRNESWHFDKSEPLCLFKKNFTYNVSTDWLYFHFYQERGTFYAYYADSGMPTTFLFSLYLGTLLSHYYVLPLTCNAISSNTDNETLQYWVTPLSKRQYLLKFDNRGVITNAVDCSSSFFSEIQCKTKSLLPNTGVYDLSGFTVKPVATVHRRIPDLPDCDIDKWLNNFNVPSPLNWERKIFSNCNFNLSTLLRLVHTDSFSCNNFDESKIYGSCFKSIVLDKFAIPNSRRSDLQLGSSGFLQSSNYKIDTTSSSCQLYYSLPAINVTINNYNPSSWNRRYGFNNFNLSSHSVVYSRYCFSVNNTFCPCAKPSFASSCKSHKPPSASCPIGTNYRSCESTTVLDHTDWCRCSCLPDPITAYDPRSCSQKKSLVGVGEHCAGFGVDEEKCGVLDGSYNVSCLCSTDAFLGWSYDTCVSNNRCNIFSNFILNGINSGTTCSNDLLQPNTEVFTDVCVDYDLYGITGQGIFKEVSAVYYNSWQNLLYDSNGNIIGFKDFVTNKTYNIFPCYAGRVSAAFHQNASSLALLYRNLKCSYVLNNISLTTQPYFDSYLGCVFNADNLTDYSVSSCALRMGSGFCVDYNSPSSSSSRRKRRSISASYRFVTFEPFNVSFVNDSIESVGGLYEIKIPTNFTIVGQEEFIQTNSPKVTIDCSLFVCSNYAACHDLLSEYGTFCDNINSILDEVNGLLDTTQLHVADTLMQGVTLSSNLNTNLHFDVDNINFKSLVGCLGPHCGSSSRSFFEDLLFDKVKLSDVGFVEAYNNCTGGSEIRDLLCVQSFNGIKVLPPILSESQISGYTTAATVAAMFPPWSAAAGIPFSLNVQYRINGLGVTMDVLNKNQKLIATAFNNALLSIQNGFSATNSALAKIQSVVNSNAQALNSLLQQLFNKFGAISSSLQEILSRLDALEAQVQIDRLINGRLTALNAYVSQQLSDISLVKFGAALAMEKVNECVKSQSPRINFCGNGNHILSLVQNAPYGLLFMHFSYKPISFKTVLVSPGLCISGDVGIAPKQGYFIKHNDHWMFTGSSYYYPEPISDKNVVFMNTCSVNFTKAPLVYLNHSVPKLSDFESELSHWFKNQTSIAPNLTLNLHTINATFLDLYYEMNLIQESIKSLNNSYINLKDIGTYEMYVKWPWYVWLLISFSFIIFLVLLFFICCCTGCGSACFSKCHNCCDEYGGHHDFVIKTSHDD

SEQ ID NO: 1037 - protein, 120 aa, Molluscum contagiosum virus
MKESLSRPPSPWLFALLLFFSASFLHAGRDCPEPPAVSVNVMVVATCTGCGHHPMSILSWIVNGTHWPNQGPMRVHRTPNGTQLRRRAFFGGGDFHKNLTCRLLDGYGSSSQKFMLRNLW

SEQ ID NO: 1038 - protein, 141 aa, Human cytomegalovirus
MYHHCCYGIITTLRPGLWCVLFFVHARHDTLLPHRQQHRRLRRHERLHRHDRRGLFRFRGLYSHLLLHVESFLRAAKDLPPPGYRVGRRGDHGLGKAPDGVGYRLLKEAIKIWEFPCLRLHDGRLFLRLGLCLVVIRARTF

SEQ ID NO: 1039 - protein, 243 aa, Punta toro phlebovirus
MSYEEIAVQFASESIDEQTVAGWVTDFAYQGFDAKRVIALVKDRGGEDWKQDVKKMIVLSLTRGNKPNKMILKMSDKGKAMVNELVLKYKLKSGNPSRDDLTLSRITAAFAGWTCQAADYVQEYLPVTGRAMDAISSSYPRAMMHPSFAGLIDQELPADVFSEITQAHCLFMIQFSKTINPSLRGLSKDEIVSSFERPMQAAISSTFLTSANRRAMLKTLGIINDNLKPSSSTVSAAKVFRSL

SEQ ID NO: 1040 - protein, 859 aa, Human immunodeficiency virus
MCGRNQLFVASLLASACLIYCVQYVTVFYGVPVWRNASIPLFCATKNRDTWGTIQCLPDNDDYQEIALNVTEAFDAWNNTVTEQAVEDVWSLFETSIKPCVKLTPLCVAMRCNSTTAKNTTSTPTTTTTANTTIGENSSCIRTDNCTGLGEEEMVDCQFNMTGLERDKKKLYNETWYSKDVVCESNDTKKEKTCYMNHCNTSVITESCDKHYWDTMRFRYCAPPGFALLRCNDTNYSGFEPNCSKVVAATCTRMMETQTSTWFGFNGTRAENRTYIYWHGRDNRTIISLNKFYNLTVHCKRPGNKTVVPITLMSGLVFHSQPINRRPRQAWCWFKGEWKEAMKEVKLTLAKHPRYKGTNDTEKIRFIAPGERSDPEVAYMWTNCRGEFLYCNMTWFLNWVENRTNQTQHNYVPCHIKQIINTWHKVGKNVYLPPREGQLTCNSTVTSIIANIDGGENQTNITFSAEVAELYRLELGDYKLIEVTPIGFAPTPVKRYSSAPVRNKRGVFVLGFLGFLTTAGAAMGAASLTLSAQSRTLLAGIVQQQQQLLDVVKRQQEMLRLTVWGTKNLQARVTAIEKYLKDQAQLNSWGCAFRQVCHTTVPWVNDTLTPDWNNMTWQEWEQRIRNLEANISESLEQAQIQQEKNMYELQKLNSWDVFGNWFDLTSWIKYIQYGVYIVVGIIVLRIVIYVVQMLSRLRKGYRPVFSSPPAYFQQIHIHKDREQPAREETEEDVGNSVGDNWWPWPIRYIHFLIRQLIRLLNRLYNICRDLLSRSFQTLQLISQSLRRALTAVRDWLRFNTAYLQYGGEWIQEAFRAFARATGETLTNAWRGFWGTLGQIGRGILAVPRRIRQGAEIALL

SEQ ID NO: 1041 - protein, 263 aa, Vaccinia virus
MKVESVTFLTLLGIGCVLSCCTIPSRPINMKFKNSVETDANANYNIGDTIEYLCLPGYRKQKMGPIYAKCTGTGWTLFNQCIKRRCPSPRDIDNGQLDIGGVDFGSSITYSCNSGYHLIGESKSYCELGSTGSMVWNPEAPICESVKCQSPPSISNGRHNGYEDFYTDGSVVTYSCNSGYSLIGNSGVLCSGGEWSDPPTCQIVKCPHPTISNGYLSSGFKRSYSYNDNVDFKCKYGYKLSGSSSSTCSPGNTWKPELPKCVR

SEQ ID NO: 1042 - protein, 520 aa, Human papillomavirus
MARARRVKRDSATNIYRTCKQAGTCPPDVLNKVENTTIADKILQYGSAGVFFGGLGISTGKGTGGTTGYVPLGEGPIRVGGTPTVIRPSLVPDTIGPSDIIPVDTLNPVEPTSSSIVPLTESSGPDLLPGEVETIAEIHPGPVVPSTDTPVTTTSRGASAVLEVAPEPTPPSRVRVSGTQYHNPSFQVITESTPAQGESSLADHILVTSGSGGQTIGGTASDLIELQEFPTRYSFEIDEPTPPRQSSTPLQRIRTALRRRGGLTNRRLVQQVPVEDPLFLSQPSRLVRFQFDNPVFEDEVTQIFEQDLNDFQEPPDRDFLDIRSLGRPQYSETPAGYVRVSRLGQRRTIRTRSGAQIGSQVHFYRDLSSINTEDPIELQLLGQHSGDATIVQGLTESTFVDVNVDENPLAEDFSISAHSDDLLLDEANEDFSGSQLVVGGRRSTSTYTVPRVETTRSASYYTQDIQGYYVSYPEDRDTSKDIIYPMPDLPVVIIHTYDTSGDFYLHPSLTTRRRRKRKYL

SEQ ID NO: 1043 - protein, 133 aa, Human adenovirus
MCDDAAVDILDLTPLGESYRPRELEPEREFNRINLGIVDGGLPKDFLHVARVILVGDLGHELLDLFLLKISAARSLDGGREVVGDAPNELRECIHARLVPDAAVDHSPHGISRAHNHLGEVKLYVAGEDRIVA

SEQ ID NO: 1044 - protein, 172 aa, JC polyomavirus
MDKVLNREESMELMDLLGLDRSAWGNIPVMRKAYLKKCKELHPDKGGDEDKMKRMNFLYKKMEQGVKVAHQPDFGTWNSSEVGCDFPPNSDTLYCKEWPNCATNPSVHCPCLMCMLKLRHRNRKFLRSSPLVWIDCYCFDCFRQWFGCDLTQEALHCWEKVLGDTPYRDLKL

SEQ ID NO: 1045 - protein, 532 aa, Molluscum contagiosum virus
MTARGFHACTGKHARVSVACVVVVCVLGAFLALVLLAPPGSGRIRFLDAEPTHVSYLPTTTGVPFVTTTVNGTIGVADNGTNGSDNSTNGANSANVTGNWPSNSTVPSTRPRVRTTSKPLTPPPGFHIGATPRRELPLPSEADYLLYGTPWFWKNRTRTVDTRCKRVMAMETETLVLSNSRVQGPVLYAHVVHTTSSSTRYVTLKTVDGTCMSGCAGDGSGRHGYMRMLLGGVSVSVATVEDAGMYLVTVATTTSYTVNCYSATILARLQRPRLEIVHAGYGEEMCSFRLRCSMPGDTPAKIILSGLYDRRNSQLWTSSPGQDLDVLLTVSGYGYDKVACHAMTYRDSVASKSLPLSEICRKDRIDTRAPDDSSACSLRVSDLEGQLANKCPKPWCPKCSQCPTPETKPECPRTNSELSGKLVVAAAVSAVLNLITAAVLVWRGLCRLCKVLLAARTRQPQYHFLEEGGHLPPPPPYCPVPPPYSDNTRPDASPGAGQDVAQDTSSDAGPGAAPDAGTETVPTNAALPVALP

SEQ ID NO: 1046 - protein, 111 aa, Human cytomegalovirus
MNSLLAELNRLGVAHATTEDVFIFVDRLFQHFSFLFQAEESGPRRLELVASVFEHLTVECVNDILDACSHPDVNVAETSNTCRPCPSPVPSAPKTVSGAQTSCATPRAPVT

SEQ ID NO: 1047 - protein, 738 aa, Cercopithecine herpesvirus
MFGRQLADDVRLFFEGLEKQRQQRMGASDAPAGLAAGDALRVPFLDFATAAPRRHQTVVPGVGTLHDCCEHAPLFSAVARRLLFNSLVPPQLRGRDFGGDRATKLEFLAPELVRAVARLRFAECAPGDVVPQRNAYYSVLNTFRALHRSEAFQQLVHFVRDFARLLRTSFRASSLAEDAGPAKKRAKVDVATHGRSHGTLEPFQKMILMHATYFLAAVLLGDHAEQVSTFLRLVFEIPLFSDAAVRHFRQRATVFLVPRRHGKTWFIVPLIALSLASFRGIKIGYTAHIRKATEPVFDEIDACLQGWFGSSRVDHVKGETISFSFPDGSRSTIVFASSHNTNGIRGQDFNLLFVDEANFIRPDAVQTIMGFLNQANCKIIFVSSTNTGKASTSFLYNLRGAADELLNVVTYICDDHMPRVVTHTNATACSCYILNKPVFITMDGALRRTADLFLADSFMQEIIGGQSREADDDRPVLTKPAGERFLLYRPSTTTNGGLMAPELYVYVDPAFTANTRASGTGVAAVGRYRDDFIVFALEHFFLRALTGSAADDIARCAAHSLTQVLALHPGVFRSVRVAVEGNSSQDSAVAIAARLHAELHRLLASGGAGVAVPELLFYHCEPPGGSVLYPFFLLNKQKTPAFEYFIKKFNSGGVMASQEVVSVTMRLQTDPVEYLTAQLNNLTEILSPNSDARSYSGKRNGASDDLMVAVIMAVYLAATPHAHHAFAPVTRAGQALER

SEQ ID NO: 1048 - protein, 171 aa, Variola virus
MDKKSLYKYLLLRSTGDMRRAKSPTIMTRVTNNVYLGNYKNAMNAPSSEVKFKYVLNLTMDKYTLPNSNINIIHIPLVDDTTTDISKYFDDVTAFLSKCDQRNEPVLVHCVAGVNRSGAMILAYLMSKNKESSPMLYFLYVYHSMRDLRGAFVENPSFKRQIIEKYVIDKN

SEQ ID NO: 1049 - protein, 319 aa, Vaccinia virus
MGTNGVRVFVILYLLAVCGCIEYDVDDNVHICTHTNVSHINHTSWYYNDKVIALATEDKTSGYISSFIKRVNISLTCLNISSLRYEDSGTYKGVSHLKDGVIVTTTMNISVKANIIDLTGRVRYLTRNYCEVKIRCEITSFALNGSTTPPHMILGTVDKWKYLPFPTDDYRYVGELKRYISGNPYPTESLALEISSTFNRFTIVKNLNDDEFSCYLFSQNYSFHKMLNARHICESEWEALNNNNDNSSSMPASHNNLANDLSSMMSQLQNDNNDYSAPMNVDNLIMIVLITMLSIILVIIVVIAAISMYKRSKYRHIDN

SEQ ID NO: 1050 - protein, 464 aa, Human papillomavirus
MPRAKRRKRASPTDLYRTCKQAGTCPPDIIPRLEQNTLADKILKWGSLGVFFGGLGIGTGSGTGGRTGYIPVGTRPTTVVDIGVAPKPPVVIEPVGASEPSIVTLVEDSSIINAGASHPTFTGTGGFEVTTSTVTDPAVLDITPSGTSVQVSSSSFLNPLYTEPAIVEAPQTGEVSGHVLVSTATSGSHGYEEIPMQTFATSGGSGQEPISSTPLPGVRRVAGPRLYSRANQQVQVRDPAFLERPADLVTFDNPVYDPEETIIFQHPDFHEPPDPDFLDIVALHRPALTSRQGTVRFSRLGRRATLRTRSGKQIGARVHFYHDISPVVPDELEMEPLLPPASTVGSDVLYDVYADPDVLQPLDDYYPAPRGSLANTTVSASSASTLRGSTTAPLSGGVDVPVYTGPDIEPPVVPGLGPLIPVAPSLPSSVYIFGGDYYLLPSYILWPKRRKRVNYFFADGFVAA

SEQ ID NO: 1051 - protein, 517 aa, Human adenovirus
MASRGGNQSSDRQREHTPERGMGSASHPLPRPDRSPSQSPPPLPPKRNTYRRVGSDSSIESQVVLVSETSRSSLSPERSNSPPPIPPKKKPRKTKHVPLQDIGHDSEEEREQAQLVAVGFSYPPVRIIEKDGKRSVEKIDKNDPIAKGATSIAVRNPLSLPLVSAWEKGMEVMAVLMERYRLDNDLRTSFKLMPEQHEQYKRICHQYVNEEHRGIPLTFSSMKTLTAMMGRFMQGLVHSYSEIAHNSWECTGCALWAHGCTDYEGKVKCLHGTIMIQKDHIIEMDVASENGQRAMKENPDRAKITQNRWGRNVVQLANNDARCCVNDANCATNQFSSKSCGMFYTEGSKAQEAFKQYEAFMKAVYPGITPDQARMMLIPIHCDCNHKPGCAPVMGRQTCKMTPFGMANAEDLDVTTISDPTVLASVRHPALMVFQCCNPVYRNSRVQNAGPNCDFKISAPDLLGALQLTRKLWQDTFPEIPVPKLVIPEFKWQNRLQFRNVSLPAGHFDSRQNPFDF

SEQ ID NO: 1052 - protein, 194 aa, WU polyomavirus
MDKTLSRNEAKELMQLLGLDMTCWGNLPLMRTKYLSKCKEFHPDKGGNEEKMKKLNSLYLKLQECVSTVHQLNEEEDEVWSSSQVECTELCCNFPPRKYRLVGEVYGDVFEEYILKDWDICLKGFYYLCNCFYCFLDKRHKQKYKIFRKPPMWIECYCYRCYREWFGFEISAETFFYWKKIIFLTTMQGVGLTR

SEQ ID NO: 1053 - protein, 276 aa, Molluscum contagiosum virus
MAALSVHDVHSAAQRRAPSQQTLFTRGLRPLMRNTYLFHNYAYGWIPATAAWSSRFADLDVTDYYPVSLGLLRKLEFMFSLYRGPPLQYLPRVNTEFVSTGAFLGRFDDFFKRFAILPTREFISFLLLTSLPAYNLLFVFRGTRFELDKHTLFSAFYTTRERHVELARYFRHGGDYKPLFGHPDATGDGSVTGDGRSLPRGSASALMSNGPRGRLVPSDYETLANLSAILYFTDYDPVLMFLAFYIPSFSVTTKITPGVEYLMERLQVRLEDVTLV

SEQ ID NO: 1054 - protein, 111 aa, Human cytomegalovirus
MNSLLAELNRLGVAHATTEDVFIFVDRLFQHFSFLFQAEESGPRRLELVASVFEHLTVECVNDILDACSHPDVNVVETSNTCRPCPSPVPSAPKTVSDAQTSCATPRAPVT

SEQ ID NO: 1055 - protein, 179 aa, Molluscum contagiosum virus
MSYLNYYNIFDDFQAGAGVMDEELFTPEEEKSFLPHAGVAPGNAFFSSILRNADVRTLLGLVLFVIALGAPPSVGVFMVCAAALLMPLPCLVIAYCLAMQITHPNAGANVGMAVLCVLASVAVMLLVRSVAASAALSLTAAGVLLALFCAYALRLSRPSAVTGCKRAGAGFLPTFSDGY

SEQ ID NO: 1056 - protein, 289 aa, Human adenovirus
MRHIICHGGVITEEMAASLLDQLIEEVLADNLPPPSHFEPPTLHELYDLDVTAPEDPNEEAVSQIFPDSVMLAVQEGIDLLTFPPAPGSPEPPHLSRQPEQPEQRALGPVSMPNLVPEVIDLTCHEAGFPPSDDEDEEGEEFVLDYVEHPGHGCRSCHYHRRNTGDPDIMCSLCYMRTCGMFVYSPVSEPEPEPEPEPEPARPTRRPKMAPAILRRPTSPVSRECNSSTDSCDSGPSNTPPEIHPVVPLCPIKPVAVRVGGRRQAVECIEDLLNEPGQPLDLSCKRPRP

SEQ ID NO: 1057 - protein, 480 aa, Vaccinia virus
MPIFVNTVYCKNILALSMTKKFKTIIDAIGGNIIVNSTILKKLSPYFRTHLRQKYTKNKDPVTRVCLDLDIHSLTSIVIYSYTGKVYIDSHNVVNLLRASILTSVEFIIYTCINFILRDFRKEYCVECYMMGIEYGLSNLLCHTKNFIAKHFLELEDDIIDNFDYLSMKLILESDELNVPDEDYVVDFVIKWYIKRRNKLGNLLLLIKNVIRSNYLSPRGINNVKWILDCTKIFHCDKQPRKSYKYPFIEYPMNMDQIIDIFHMCTSTHVGEVVYLIGGWMNNEIHNNAIAVNYISNNWIPIPPMNSPRLYASGIPANNKLYVVGGLPNPTSVERWFHGDAAWVNMPSLLKPRCNPAVASINNVIYVMGGHSETDTTTEYLLPNHDQWQFGPSTYYPHYKSCALVFGRRLFLVGRNAEFYCESSNTWTLIDDPIYPRDNPELIIVDNKLLLIGGFYRESYIDTIEVYNHHTYSWNIWDGK

SEQ ID NO: 1058 - protein, 568 aa, Human papillomavirus
MCLYTRVLILHYHLLPLYGPLYHPRPLPLHSILVYMVHIIICGHYIILFLRNVNVFPIFLQMALWRPSDNTVYLPPPSVARVVNTDDYVTPTSIFYHAGSSRLLTVGNPYFRVPAGGGNKQDIPKVSAYQYRVFRVQLPDPNKFGLPDTSIYNPETQRLVWACAGVEIGRGQPLGVGLSGHPFYNKLDDTESSHAATSNVSEDVRDNVSVDYKQTQLCILGCAPAIGEHWAKGTACKSRPLSQGDCPPLELKNTVLEDGDMVDTGYGAMDFSTLQDTKCEVPLDICQSICKYPDYLQMSADPYGDSMFFCLRREQLFARHFWNRAGTMGDTVPQSLYIKGTGMPASPGSCVYSPSPSGSIVTSDSQLFNKPYWLHKAQGHNNGVCWHNQLFVTVVDTTPSTNLTICASTQSPVPGQYDATKFKQYSRHVEEYDLQFIFQLCTITLTADVMSYIHSMNSSILEDWNFGVPPPPTTSLVDTYRFVQSVAITCQKDAAPAENKDPYDKLKFWNVDLKEKFSLDLDQYPLGRKFLVQAGLRRKPTIGPRKRSAPSATTSSKPAKRVRVRARK

SEQ ID NO: 1059 - protein, 189 aa, Human adenovirus
MFSTTIFIITSLAAVTYGRSHLTVPVGSTCTLQGPQQGYVTWWRIYDNGGFARPCDQPGTKFSCNGRDLTIINITSNEQGFYYGTNYKDSLDYNIIVVPATTSAPRKTTFSSSSAKASTIPKTASAMLKLQKIALNNSTAAPNTIPKSTIGIITAVVVGLIIIFLCIMYYACCYRKHEQKGDALLNFDI

SEQ ID NO: 1060 - protein, 130 aa, Human immunodeficiency virus
METPLKAPEGSLGSYNEPSSCTSEQDAAAQGLVSPGDEILYQLYQPLEACDNKCYCKKCCYHCQMCFLNKGLGIWYERKGRRRRTPKKTKAHSSSASDKSISTRTGNSQPEKKQKKTLETALETIGGPGR

SEQ ID NO: 1061 - protein, 565 aa, Molluscum contagiosum virus
MDFIRRKYLVHTIERNMDFLRAEVAEKVANFALNHVLALRYLVAQFPRAVLTKDVFANVNFHVFLHVVRCAQVYDAVLRSSFDATTLYVRALVRNYQAFADTVQTYRELCQTLLQDKRFLEVARAAPTLADVIGVNYDTSLNPLFLRGEPVRDMELIFTKLFRKTEFRPVKKLAVLRLLLWAYLCKQDTGLDFADNDAQDLYSLFQKTGPVVHSEMTERFKAFMFAGEKTSYWVWLQEPVANDADVFKERPARGMYERLLSYLYSELKQGRVNKNMLKLVYIFDSDPSIRSLVLEIIYGVPGDILGVVDSEDETWKAYFVALYREHFVDGRTFTSTQSFFRDLFRVVARVDPEHFGAERFAALFNAQPEARARFDDMDVNTTFVSRMVYQTPDLDLLALERNRMCQIYSEDTQYYVKEYNTFLFLHEDDPVVIDEGALVRLSSVPSERRRLLFSEHVLKYWLDGQLARLGLVLPSYDDVVLRMVTHMKCLEDVTAFVDYATRRNASMVPAVTRGLLAHFHVPVLVLFQRFLREHLLRVREVLDRSEHLTEREKKYILQIITHGRS

SEQ ID NO: 1062 - protein, 85 aa, Human herpesvirus
MNSALNGIKDDFENCETKDDLFKIIDKISKNCNFIVEQVESLPRRVDSAAILFDNLAVEIFNDVIYRQNGVAAKIRQGNGQDIDT

SEQ ID NO: 1063 - protein, 187 aa, Molluscum contagiosum virus
MNQHNVEYLAKILCLKAEVARNPYVVVSKELLSRYDVRTRYGDLVTLVRVTHRVDNSTTVFQVFNEAAVSYTPLEHDYGEPIIVTAFALPAHNKFPVSALYIDMVASDLFPRFARVDPDTAKVITSLLTPEDRRNEQPVRLPRMLETEVVAKILYHPKVPLKIVRFYKPNMLTGVELADRAVAAVLE

SEQ ID NO: 1064 - protein, 266 aa, Human adenovirus
MRTEMTPLVLSYQEADDILEHLVDNFFNEVPSDDDLYVPSLYELYDLDVESAGEDNNEQAVNEFFPESLILAASEGLFLPEPPVLSPVCEPIGGECMPQLHPEDMDLLCYEMGFPCSDSEDEQDENGMAHVSASAAAAAADREREEFQLDHPELPGHNCKSCEHHRNSTGNTDLMCSLCYLRAYNMFIYSPVSDNEPEPNSTLDGDERPSPPKLGSAVPEGVIKPVPQRVTGRRRCAVESILDLIQEEEREQTVPVDLSVKRPRCN

SEQ ID NO: 1065 - protein, 260 aa, Vaccinia virus
MSIRIKIDKLRQIVAYFSEFSEEVSINVDSTDELMYIFAALGGSVNIWAIIPLSASVFYRGAENIVFNLPVSKVKSCLCSFHNDAIIDIEPDLENNLVKLSSYHVVSVDCNKELMPIRTDTTICLSIDQKKSYVFNFHKYEEKCCGRTVIHLEWLLGFIKCISQHQHLAIMFKDDNIIMKTPGNTDAFSREYSMTECSQELQKFSFKIAISSLNKLRGFKKRVNVFETRIVMDNDDNILGMLFSDRVQSFKINIFMAFLD

SEQ ID NO: 1066 - protein, 467 aa, Human papillomavirus
MRHKRSTRRKRASATQLYQTCKATGTCPPDVIPKVEGSTIADQILKYGSLGVFFGGLGIGTGSGSGGRTGYVPIGTDPPTAAIPLQPIRPPVTVDTVGPLDSSIVSLIEETSFIEAGAPAPSIPTPSGFDVTTSADTTPAIINVSSVGESSIQTISTHLNPTFTEPSVLHPPAPAEASGHFIFSSPTVSTQSYENIPMDTFVVSTDSSNVTSSTPIPGSRPVARLGLYSRNTQQVKVVDPAFLTSPHKLITYDNPAFESFDPEDTLQFQHSDISPAPDPDFLDIIALHRPAITSRRHTVRFSRVGQKATLKTRSGKQIGARIHYYQDLSPIVPLDHTVPNEQYELQPLHDTSTSSYSINDGLYDVYADDVDNVHTPMQHSYSTFATTRTSNVSIPLNTGFDTPVMSGPDIPSPLFPTSSPFVPISPFFPFDTIVVDGADFVLHPSYFILRRRRKRFPYFFTDVRVAA

SEQ ID NO: 1067 - protein, 178 aa, Human adenovirus
MEVWAILEDLRQTRLLLENASDGVSGLWRFWFGGDLARLVFRIKQDYSVEFEKLLDDSPGLFEALNLGHQAHFKEKVLSVLDFSTPGRTAAAVAFLTFILDKWIRQTHFSKGYVLDFIAAALWRTWKARRMRTILNYWPVQPLGVAGILRHPPTMPAVLQEEQQEDNPRAGLDPPVEE

SEQ ID NO: 1068 - protein, 100 aa, Human immunodeficiency virus
MEPVNPSLEPWKHPGSQPKTACTNCYCKKCCFHCQACFITKGLGISYGRKKRRQRRRPPQDSQTHQVSLSKPSSQPRGDPTGPKEQKKKVERETETDPVH

SEQ ID NO: 1069 - protein, 398 aa, Orf virus
MESSKQAPRAGARVFESLLKFVVRGAACGCLSSTVDIEAKARLLPGSSPQRRAQIANAIHDLCIANVRVTTREDLVEALARLRRRFVHAGNSADLARLHGALMRFTHSTSFFAVCTPTVRVTLATLVASVLVGELMQAVDMAEAVERVIYTKNRPMASELADLLELKYGLVNMAQYKLMPALMEEAGCCDELVRAGAPDACTDSVAEMEAERLLDMPVRSSALSRLCDFMVRRGASPVHAASEFAAGLKIEEMPADADSAAAAPVPAPAAADFGSVVARTEDLLERARKESRGEVLDGAVSSPLGVAGSSPFDGITLEKFVLLEYLHVMKMLANCIEQRSCKERIRVSVNTQPFRTTSATPTPVDPAETADAEAQCRALQQRLQVARPVLGTRAPPLF

SEQ ID NO: 1070 - protein, 423 aa, Human cytomegalovirus
MEKTPAETTAVSAGNVPRDSIPCITNVSADTRGRTRPSRPATVPQRRPARIGHFRRRSASLSFLDWPDGSVTEGVRTTSASVAASAARFDEIRRRRQSINDEMKERTLEDALAVELVNETFRCSVTSDARKDLQKLVRRVSGTVLRLSWPNGWFFTYCDLLRVGYFGHLNIKGLEKTFLCCDKFLLPVGTVSRCEAIGRPPLPVLIGEGGRVYVYSPVVESLYLVSRSGFRGFVQEGLRNYAPLREELGYVRFETGGDVGREFMLARDLLALWRLCMKREGSIFSWRDGNEALTTVVLNGSQTYEDPAHGNWLKETCSLNVLQVFVVRAVPVESQQRLDISILVNESGAVFGVHPETRQAHFLARGLLGFFRVGFLRFCNNYCFARDCFTHPESVAPAYRATGCPRELFCRRLRKKKGLFARR

SEQ ID NO: 1071 - protein, 720 aa, Cercopithecine herpesvirus
MQRRSRGASSLRLASCLAPAGTAHRHDAGAASTRIFGGCLLPTPEGLVGAAVGALRQRSDELQPAFLTGAVRAAQLAARRHNSVPESLIVDGITGDPNCEYIKHYAAAATESLAEAGASSGALYRGILSQYWKHLQAVVSGGLRIPEAPPTDCDPSLQVLLRPALVPKLLARTPFKNGAQSARYAAAVLGLRDAVHRLQQYMFFMRPDDPSRRSADTALRLGEILAYSGALYDWAEWMVQTADAQVCRRLDPTGRRCVPPARTAPAPADAFARHLDRGPGGTTGSMQCMALRAAVGDVFGHLRVLAGLWERGKRGSATCGTVETIVSTVEAVSLVHHHAQYLLNATLTGYVIWASGSLDNEHLRAAVERQERFCRATAPLFPTMTPSSWARMERSVKAWFEAALATELFRTGVPSPHYEASLRLLSSPPGALPPRENDPAPPPPARRFDRARPGSTPACARRARAQRGRDGRDGHGSDDLTDAPLVLGGERVDSLGALRRLVAGAARDPAPRAAPPTTLYYTRMDGAPPRLPPRGRRTETLRRRPAAAAPPEDPYLAPYDEDDGRSAYASQHPRAAGAPDDEHVYEYASDSEEPIYEEIPTPRIYQNVLPRPMEAAAEPPVLSSPTSLWVEEENPIYGWGDSPLFSPPPIARGPAPAAPEPAPEPDPEPEPDPDLEPEPPCLPAHRPRTGALDPTGQANLAALSAMLTKLKHDRRHHHSH

SEQ ID NO: 1072 - protein, 496 aa, Human adenovirus
MERRNPSERGVPAGFSGHASVESGCETQESPATVVFRPPGDNTDGGAAAAAGGSQAAAAGAEPMEPESRPGPSGMNVVQVAELYPELRRILTITEDGQGLKGVKRERGACEATEEARNLAFSLMTRHRPECITFQQIKDNCANELDLLAQKYSIEQLTTYWLQPGDDFEEAIRVYAKVALRPDCKYKISKLVNIRNCCYISGNGAEVEIDTEDRVAFRCSMINMWPGVLGMDGVVIMNVRFTGPNFSGTVFLANTNLILHGVSFYGFNNTCVEAWTDVRVRGCAFYCCWKGVVCRPKSRASIKKCLFERCTLGILSEGNSRVRHNVASDCGCFMLVKSVAVIKHNMVCGNCEDRASQMLTCSDGNCHLLKTIHVASHSRKAWPVFEHNILTRCSLHLGNRRGVFLPYQCNLSHTKILLEPESMSKVNLNGVFDMTMKIWKVLRYDETRTRCRPCECGGKHIRNQPVMLDVTEELRPDHLVLACTRAEFGSSDEDTD

SEQ ID NO: 1073 - protein, 179 aa, Vaccinia virus
MSMYGELFNHASVKESFGNFSIIELPYVGDTSMMVILPDKIDGLESIEQNLTDTNFKKWCNSLEATFIDVHIPKFKVTGSYNLVDTLVKSGLTEVFGSTGDYSNMCNSDVSVDAMIHKTYIDVNEEYTEAAAATCALVSDCASTITNEFCVDHPFIYVIRHVDGKIFFVGRYCSPTTNC

SEQ ID NO: 1074 - protein, 260 aa, Variola virus
MSIRIKIDKLRQIVAYFSEFSEEVSINVDSTDELMYIFAALGGSVNIWAIIPLSASVFYRGAENIVFNLPVSKVKSCLCSFHNDAIIDIEPDLENNLVKLSSYHVVSVDCNKELMPIRTDTTICLSIDQKKSYVFNFHKYEEKCCGRTVIHLEWLLGFIKCISQHQHLTIMFKDDNIIMKTPGNTDAFSREYSMTECSQELQKFSFKIAISSLNKLRGFKKRVNVFETRIVMDNDDNILGMLFSDRVQSFKINIFMAFLD

SEQ ID NO: 1075 - protein, 172 aa, Human adenovirus
MGAILVVLALLSLLGLGSANLNPLDHDPCLDFDPENCTLTFAPDTSRLCGVLIKCGWDCRSVEITHNNKTWNNTLSTTWEPGVPEWYTVSVRGPDGSIRISNNTFIFSEMCDLAMFMSRQYDLWPPSKENIVAFSIAYCLVTCIITAIICVCIHLLIVIRPRQSNKEKEKMP

SEQ ID NO: 1076 - protein, 99 aa, Human immunodeficiency virus
MDPVDPNLEPWNHPGSQPRTPCNKCHCKKCCYHCPVCFLNKGLGISYGRKKRRQRRGPPQGGQAHQVPIPKQPSSQPRGDPTGPKEQKKKVESEAETDP

SEQ ID NO: 1077 - protein, 60 aa, Orf virus
MEEDLNEAGLLHMLTRIAQICGGDAAAAAATIKMLMDLVNERIMILNKKAKKEMGQASSA

SEQ ID NO: 1078 - protein, 379 aa, Human cytomegalovirus
GDGVFITESSVFETRASGRFFHRRRSRFDFRALVSPDRLVVGYFDSLSSLYLRGQPKFSSIWRGLRDAWTHKRPKPRERASGVHLQRYVRATAGRWLPLCWPPLHGIMLGDTQYFGVVRDHKTYRRFSCLRQAGRLYFIGLVSVYECVPDANTAPEIWVSGHGHAFAYLPGEDKVYVLGLSFGEFFENGLFAVYSFFERDYVDEIVEGAWFKHTFAGMYELSQILHDRANLLRVCQLHAGSKIRLGGSPACTFTFGSWNVAEADEANNFVIGVLEQAHFVVIGWMEPVNKAVFMDAHGGIHVLLYGTMLVKLAETLRGFIRQGSFWFRCPRRFCFSPLDSSATVAAKPVSSHTSPAYDVSEYVFSGRSVLDSVSGTGAS

SEQ ID NO: 1079 - protein, 266 aa, Cercopithecine herpesvirus
MARRTGDPIERRRILMAGVRSHVRFYGALAREIREFNATRVCGTLLALLNKSLQGRSIFQAARVTLICEVDLGARRPDCLCVFEFANDATLGGVCVIIELKTCKFISSGDTASKREQRATGLSQLRDSVKLVQALAPPGHRTIYLCPVLLFVSQKTLRVSRVTRLLPQKITGDVAATVRTLQGLSTYAVPLESVAKRGGRSGSRRPRARRRARGKAASPPGPAIPRAPDRPTTPGRLPDPGARPARGGGVLQKIAALFCVPVSRPE

SEQ ID NO: 1080 - protein, 482 aa, Human adenovirus
MEREIPPELGLHAGLHVNAAVEGMAEEEGLHLLAGAAFDHAAAADVARGEGGGAEPCGGGEVNMEQQVQEGHVLDSGEGPSCADDRDKQEKKESLKEAAVLSRLTVNLMSRPRLETVYWQELQDEFQRGDMHLQYKYSFEQLKTHWLEPWEDMECAIKAFAKLALRPDCSYRITKTVTITSCAYIIGNGAIVEVDTSDRVAFRCRMQGMGPGVVGLDGITFINVRFAGDKFKGIMFEANTCLVLHGVYFLNFSNICVESWNKVSARGCTFYGCWKGLVGRPKSKLSVKKCLFEKCVLALIVEGDAHIRHNAASENACFVLLKGMAILKHNMVCGVSDQTMRRFVTCADGNCHTLKTVHIVSHSRHCWPVCDHNMFMRCTIHLGLRRGMFRPSQCNFSHSNIMLEPEVFSRVCLNGVFDLSVELCKVIRYNDDTRHRCRQCECGSSHLELRPIVLNVTEELRSDHLTLSCLRTDYESSDEDDN

SEQ ID NO: 1081 - protein, 346 aa, Vaccinia virus
MAVYAVTGGAGFLGRYIVKLLISADDVQEIRVIDIVEDPQPITSKVKVINYIQCDINDFDKVREALDGVNLIIHTAALVDVFGKYTDNEIMKVNYYGTQTILAACVDLGIKYLIYTSSMEAIGPNKHGDPFIGHEHTLYDISPGHVYAKSKRMAEQLVMKANNSVIMNGAKLYTCCLRPTGIYGEGDKLMKVFYEQCKQHGNIMYRTVDDNAVHSRVYVGNAAWMHVLAAKYIQYPGSEIKGNAYFCYDYSPSCSYDMFNLLLMKPLGIEQGSRIPRWMLKMYACKNDMKRILFRKPSLLNNYTLKISNTTFEVRTNNAELDFNYSPIFDVDVAFKRTRKWLEESE

SEQ ID NO: 1082 - protein, 503 aa, Human papillomavirus
MALWRTSDSKVYLPPTPVSRVVNTDEYVTRTGIYYYAGSSRLLTLGHPYFSIPKTGQKAEIPKVSAYQYRVFRVHLPDPNKFGLPDPQLYNPDTERLVWACVGVEVGRGQPLGIGLSGHPLFNKLDDTENSHLATVNADTDNRDNVSVDNKQTQLCIIGCTPPLGEHWGIGTICKNTQTQRGDCPPLELISSIIEDGDMIDTGFGAMDFTALQATKSDVPIDISQSTCKYPDYLKMSADTYGNSMFFFLRREQLFARHFYNKAGAVGDAIPTTLYIKGAESGREPPTSSIYSATPSGSMVTSDAQLFNKPYWLQRAQGHNNGICWGNQLFVTCVDTTRSTNLTISTLSAASASTPFKPSDYKQFIRHGEEYELQFIFQLCKITLTTDVMAYIHLMNASILEDWNFGLTLPPTASLEDAYRFIKNSATTCQRNAPPVPKEDPFQKFKFWDVDLKEKFSIDLDQFPLGRKFMLQAGIQRRPKLGTKRPLSSTSSSTKRKKRKLTK

SEQ ID NO: 1083 - protein, 234 aa, Human adenovirus
MEDINFASLAPRHGTRPFMGTWNEIGTSQLNGGAFNWSSVWSGLKNFGSTLRTYGNKAWNSSTGQLLREKLKDQNFQQKVVDGLASGINGVVDIANQAVQREINSRLDPRPPTVVEMEDATLPPPKGEKRPRPDAEETILQVDEPPSYEEAVKAGMPTTRIIAPLATGVMKPATLDLPPPPTPAPPKAAPVVQPPPVATAVRRVPARRQAQNWQSTLHSIVGLGVKSLKRRRCY

SEQ ID NO: 1084 - protein, 86 aa, Human immunodeficiency virus
MEPVDPRLEPWKHPGSQPKTACTNCYCKKCCFHCQVCFITKALGISYGRKKRRQRRRAHQNSQTHQASLSKQPTSQPRGDPTGPKE

SEQ ID NO: 1085 - protein, 380 aa, Orf virus
MLALFEFLRSVEDCYRRTIFNFHIAHSAEAGDVYGVLRDRILAATRFEEVAPPGLADALAKVVYCDISTTKHLVNHAAFAARARSARRGGSLAQFFDVHVGEDAESRRTAEIFDRERSSLVSYVKTTAKRCKIDYGEIKRTIHGGRQTYFSGRRSDDFLSTTVRADPSKPWIKSISKQLRVDILHHAICTRGKSSILQTIEVVLTNRTCVKIFKDSTMHIILSKDDRERGLADLADKLFGTYATTFRVIAAITGNACFAAVADAAARVVALPDADAKLEAVRGLADCYGVRNFKIGMFNLTFTGAIEHTVFPSLIPAESKIKFFKGKKLNIVAVRSTEEGRECVEQAQALLAAMRERSARLAAADVATASVDFLKELLGA

SEQ ID NO: 1086 - protein, 225 aa, Epstein-Barr virus
MSDQGRLSLPRGEGGTDEPNPRHLCSYSKLEFHLPLPESMASVFACWGCGEYHVCDGSSECTLIETHEGVVCALTGNYMGPHFQPALRPWTEIRQDTQDQRDKWEPEQVQGLVKTVVNHLYHYFLNENVISGVSEALFDQEGALRPHIPALVSFVFPCCLMLFRGASSEKVVDVVLSLYIHVIISIYSQKTVYGALLFKSTRNKRYDAVAKRMRELWMSTLTTKC

SEQ ID NO: 1087 - protein, 169 aa, Molluscum contagiosum virus
MAAPRRISLPSVTISAPRAVLRQERQEPLSCVLPEYYYTVAQLRLQVNSERARCWFCSQAVGAAAWAIETLHGHAVGSFCSRICRDSFASTVRTHVALREEPKVTLLPLVFFQHPEKVLELIRSLRSREGIYGTCFFDERAGAVTLTLRSLHEQDETAGGVFNDARDSK

SEQ ID NO: 1088 - protein, 91 aa, Human adenovirus
MVTVLLIFLCLPVIFSSSTFAAVSDLDPECLAPFAVYLIFTFVTATCVCSIITLLITSLQFFDYYYVRIVYRRHHPRYQNPQIAALLQLQP

SEQ ID NO: 1089 - protein, 142 aa, Vaccinia virus
MNTIKQSFSTSKLEGYTKQLPSPAPGICLPAGKVVPHTTFEVIEKYNVLDDIIKPLSNQPIFEGPSGVKWFDIKEKENEHREYRIYFIKENSIYSFDTKSKQTRSSQVDARLFSVMVTSKPLFIADIGIGVGMPQMKKILKM

SEQ ID NO: 1090 - protein, 150 aa, Variola virus
MAKRVSLPDVVISAPKAVFKPAKEEALACILPKYYKSMADMSIKTNSVIDKCWFCNQDLVFRPISIETFKGGEVGYFCSKICRDSLASMVKSHVALREEPKISLLPLVFYEDKEKVINTINLLRDKDGVYGSCYFKENSQIIDISLRSLL

SEQ ID NO: 1091 - protein, 209 aa, Human immunodeficiency virus
MGGKWSKRSAPGWNTIRERMRRTEPGRTEPAAEGVGAVSRDLEQHGAITTSTSNNADCAWLEAQEEEEVGFPVRPQVPLRPMTYKGALDLSHFLREKGGLEGLIHSQRRQDILDLWVYHTQGYFPDWQNYTPGPGVRYPLTFGWCFKLVPVKPEEVEEATVGENNSLLHPMNLHGMDDPEGEVLMWKFDSRLALHHMAREKHPEYYKDC

SEQ ID NO: 1092 - protein, 353 aa, Human T-cell leukemia virus
MAHFPGFGQSLLFGYPVYVFGDCVQGDWCPISGGLCSARLHRHALLATCPEHQITWDPIDGRVIGSALQFLIPRLPSFPTQRTSKTLKVLTPPITHTTPNIPPSFLQAMRKYSPFRNGYMEPTLGQHLPTLSFPDPGLRPQNLYTLWGGSVVCMYLYQLSPPITWPLLPHVIFCHPGQLGAFLTNVPYKRIEKLLYKISLTTGALIILPEDCLPTTLFQPARAPVTLTAWQNGLLPFHSTLTTPGLIWTFTDGTPMISGPCPKDGQPSLVLQSSSFIFHKFQTKAYHPSFLLSHGLIQYSSFHNLHLLFEEYTNIPISLLFNEKEADDNDHEPQISPGGLEPLSEKHFRETEV

SEQ ID NO: 1093 - protein, 78 aa, Orf virus
MESRDLGVAVGATILMLLIVVTNGATIARRGAPSLGIRSRGALRVLTVLDFVSLLTTIPCTIILYFLYMQALNSRRQN

SEQ ID NO: 1094 - protein, 224 aa, Human cytomegalovirus
MGMQCNTKLLLPVALIPVVIILIGTLVPILLHEQKKAFYWRLFLQSQHVEAPITVTQGDTVYLDASNNPCNYSSFWYHGNCELCGWNGYLRNVTHYYTNTSCSPQFMCINETKGLQLYNVTLNDSGAYTEHVYECDLSCNITTYNEYEILNYFDNCNYTINSTKHIITVVSSRHSKQTNSHVSTHAGWAAAVVTVIMIYVLIHFNVPATLRHKLRTRNNVNRIA

SEQ ID NO: 1095 - protein, 159 aa, Molluscum contagiosum virus
MNRQASGRCRRALWISARVLFLCAFVTLAGLYLRQLLLAPAPRRLPACREHWLAFDGWCYRVAGPSSNASKARALCAAQGAELVPALRTHVSVVARVLSQTRFWIDAHQISGRWLDSQSKSLGWTGAGSGNCAAAEYGVFIPRVCSLVLPVVCAVPFYT

SEQ ID NO: 1096 - protein, 130 aa, Human adenovirus
MFERKMVSFSVVVPELTCLYLHEHDYDVLAFLREALPDFLSSTLHFISPPMQQAYIGATLVSIAPSMRVIISVGSFVMVPGGEVAALVRADLHDYVQLALRRDLRDRGIFVNVPLLNLIQVCEEPEFLQS

SEQ ID NO: 1097 - protein, 59 aa, Vaccinia virus
MSSKGGSGGMWSVFIHGHDGSNKGSKTYTSGGGGMWGGGSSSGVKSGVNGGVKSGTGKI

SEQ ID NO: 1098 - protein, 510 aa, Human papillomavirus
MSCGLNDVNVSTISLQMALWRPNESKVYLPPTPVSKVISTDVYVTRTNVYYHGGSSRLLTVGHPYYSIKKSNNKVAVPKVSGYQYRVFHVKLPDPNKFGLPDADLYDPDTQRLLWACVGVEVGRGQPLGVGVSGHPYYNRLDDTENAHTPDTADDGRENISMDYKQTQLFILGCKPPIGEHWSKGTTCNGSSAAGDCPPLQFTNTTIEDGDMVETGFGALDFATLQSNKSDVPLDICTNTCKYPDYLKMAAEPYGDSMFFSLRREQMFTRHFFNLGGKMGDTIPDELYIKSTSVPTPGSHVYTSTPSGSMVSSEQQLFNKPYWLRRAQGHNNGMCWGNRVFLTVVDTTRSTNVSLCATEASDTNYKATNFKEYLRHMEEYDLQFIFQLCKITLTPEIMAYIHNMDPQLLEDWNFGVPPPPSASLQDTYRYLQSQAITCQKPTPPKTPTDPYASLTFWDVDLSESFSMDLDQFPLGRKFLLQRGAMPTVSRKRAAVSGTTPPTSKRKRVRR

SEQ ID NO: 1099 - protein, 1059 aa, Human immunodeficiency virus
MPSTKTRLLEMWQGRTHHGKMPRKTGGFFRVGPMGKEAPQFPCGPNPAGADTNSTPDRPSRGPTREVHAAREKAERAEREAIQRSDRGLPAARETRDTMQRDDRGLAAPQFSLWKRPVVTAHVEGQPVEVLLDTGADDSIVAGVELGSNYSPKIVGGIGGFINTKEYKNVEIRVLNKRVRATIMTGDTPINIFGRNILTALGMSLNLPVAKIEPIKIMLKPGKDGPKLRQWPLTKEKIEALKEICEKMEREGQLEEAPPTNPYNTPTFAIKKKDKNKWRMLIDFRELNKVTQDFTEIQLGIPHPAGLAKKKRITVLDVGDAYFSIPLHEDFRQYTAFTLPSINNAEPGKRYIYKVSPQGWKGSPAIFQYTMRQVLEPFRKANPDIILIQYMDDILIASDRTDLEHDRVVLQLKELLNGLGFSTPDEKFQKDPPYQWMGYELWPTKWKLQRIQLPQKEVWTVNDIQKLVGVLNWAAQIYPGIKTRNLCRLIRGKMTLTEEVQWTELAEAELEENKIILSQEQEGCYYQEEKELEATVQKDQDNQWTYKIHQGGKILKVGKYAKVKNTHTNGVRLLAQVVQKIGKEALVIWGRIPKFHLPVERDTWEQWWDNYWQVTWIPDWDFISTPPLVRLVFNLVKDPILGAETFYTDGSCNKQSREGKAGYITDRGRDKVRLLEQTTNQQAELEAFAMAVTDSGPKANIIVDSQYVMGIVAGQPTESESKIVNQIIEEMIKKEAIYVAWVPAHKGIGGNQEVDHLVSQGIRQVLFLEKIEPAQEEHEKYHSNVKELSHKFGLPKLVARQIVNTCTQCQQKGEAIHGQVNAELGTWQMDCTHLEGKIIIVAVHVASGFIEAEVIPQESGRQTALFLLKLASRWPITHLHTDNGANFTSQEVKMVAWWIGIEQSFGVPYNPQSQGVVEAMNHHLKNQISRIREQANTVETIVLMAVHCMNFKRRGGIGDMTPAERLINMVTAEQEIQFLQAKNSKLQNFRVYFREGRDQLWKGPGELLWKGDGAVIVKVGADIKIIPRRKAKIIKDYGGRQEMDSGSNLEGAREDGEVA

SEQ ID NO: 1100 - protein, 95 aa, Human cytomegalovirus
MDMRKLNTSQGRNLTTVDDRRRFSIGWETWDDGGESLYDVTNNGTTVINTTACVSSCSHTSLVLCNMTQQTDSLYGVGHRLNDEEDGELWRVSVS

SEQ ID NO: 1101 - protein, 497 aa, Orf virus
MADERGPDGALFRYLESEERPDVERMRRLLDEGADVNYAGPRGYAPLHMLMRGNPLDPDAVRLLLAAGADVNATSLCGFTPLHSYMCFGTVTPDTLCALMRHGARVSDLERNINALIEYFNRNGCMGGAEAAVIALLVEHGAYVNAKDDLGRTPLHIYLSGFFVSAPVALALIALGANPNATDAYGRTPLHAFLRSRDVDPAVLKTLIAAGADPLARDIIRRTALHYHCESFKTRASVIETLVAAGCDPASTDLLDNTALHSMAMGSSCRASLIRPLLAAGVSVNARNARLQTPLHLAAVFNPPACARLLAAGADPALSDLDETTPLLSMVRHNCARAVRTALPLAPDALVAGAVNRVNARTPSAATRECVMALALRGALDLLSAESARAHAAAIRACEAEVALLRRTRLGAPPTTLFSLLTGRPNTLISAKAARRAMADVCVYRAALAARVERVRRKSSLVERLTAMVCPCALPPELVTRILALLTVEELACAMRK

SEQ ID NO: 1102 - protein, 668 aa, Human cytomegalovirus
MNPSTHVSSNGPTTPPHGPHTTFLPPTSPAPSTSSVAAATLCSPQRQAVSRYSGWSTEYTQWHSDLTTELLWHAHPRQVPMDEALAAAAAASYQVNPQHPANRYRHYEFQTLSLGTSEVDELLNCCAEETTCGGTQSTVLTNATNTTSCGGAVAGSSNAGPAGASAACDLDAELAGLETSAADFEQLRRLCAPLAIDTRCNLCAIISICLKQDCDQSWLLEYSLLCFKCSYAPRAALSTLIIMSEFTHLLQQHFSDLRIDDLFRHHVLTVFDFHLHFFINRCFEKQVGDAVDNENVTLNHLAVVRAMVMGEDTVPYNKPRRHPQQKQKNNPYHVEVPQELIDNFLEHSSPSRDRFVQLLFYMWAGTGVMSTTPLTELTHTKFARLDALSTASEREDARMMMEEEEDEEGGEKGGDDPGRHNGGGTSGGFSESTLKKNVGPIYLCPVPAFFTKNQTSTVCLLCELMACSYYDNVVLRELYRRVVSYCQNNVKMVDRIQLVLADLLRECTSPLGAAHEDVARCGLEAPTSPGGDSDYHGLSGVDGALARPDPVFCHVLRQAGVTGIYKHFFCDPQCAGNIRVTNEAVLFGHLHPHHVQEVKLAICHDNYYISRLPRRVWLCITLFKAFQITKRTYKGKVHLADFMRDFTQLLENCDIKLVDPTYVIDKYV

SEQ ID NO: 1103 - protein, 401 aa, Cercopithecine herpesvirus
MGRLLGFLLALGPWALVAGVVIRGPTISLVSDSLLAAGAVGANGSFLEDLEVPGELHFLGPQVPHVTYYDGSVELLHYPPGARCPRAVLVEEMTACPRRNAVAFTLCRSTRRAQSPAYADLTLDPTRQPLLRARGPANAVVGFYVLRVWVEGATNASLFPLSLVEFPPGKLAPAPPLGERETDGPCDPAVTPWAPRLALTDVFVPATPPPTPETTASPETTATPPAVTPAAPPTPGAEGTAAPPTPGAEGTAAPPTPGAAETRTPRRAEASAAPTSEASRYELTTARIAQIAIPACIIVCVALGSCACCLARRCRRRHHRPSRIYTPPPSAASSISAVNEAALARLGDELKRTPPESPRRSKRRPSQTMVPSLAAISEESEAPAIVALERSPRRPGGTERR

SEQ ID NO: 1104 - protein, 404 aa, Epstein-Barr virus
METTQTLRFKTKALAVLSKCYDHAQTHLKGGVLQVNLLSVNYGGPRLAAVANAGTAGLISFEVSPDAVAEWQNHQSPEEAPAAVSFRNLAYGRTCVLGKELFGSAVEQASLQFYKRPQGGSRPEFVKLTMEYDDKVSKSHHTCALMPYMPPASDRLRNEQMIGQVLLMPKTASSLQKWARQQGSGGVKVTLNPDLYVTTYTSGEACLTLDYKPLSVGPYEAFTGPVAKAQDSGAVEAHVVCSVAADSLAAALSLCRIPAVSVPILRFYRSGIIAVVAGLLTSAGDLPLDLSVILFNHASEEAAASTASEPEDKSPRVQPLGTGLQQRPRHTVSPSPSPPPPPRTPTWESPARPETPSPAIPSHSSNTALERPLAVQLARKRTSSEARQKQKHPKKVKQAFNPLI

SEQ ID NO: 1105 - protein, 142 aa, Vaccinia virus
MSYACPILSTINICLPYLKDINMIDKRGETLLHKAVRYNKQSLVSLLLESGSDVNIRSNNGYTCIAIAINESKNIELLKMLLCHKPTLDCVIDSLREISNIVNNDYAIKQCIKYAMIIDDCTSSKIPESISQRYNDYIDLCN

SEQ ID NO: 1106 - protein, 508 aa, Human papillomavirus
MFPIFLQMAVWRPSETKVYLPPTPVSKVVPTDAYVKRTNIFYHAGSSRLLAVGHPYYSISKAGNSKTDVPKVSAFQYRVFRVRLPDPNKFGLPDTNVFNPEQERLVWACVGLEIGRGQPLGVGVSGNPLFNKLDDTESSTIANQDTAEDSRDNISVDPKQTQLCIIGCTPAIGEHWAKGTACRSAPPAQGDCPPLELVNSPIQDGDMVDIGFGAMDFKTLQESKSDVPLDISQSTCKYPDYLKMSADAYGDSMWFYLRREQLFARHYFNRAGAIGEQLPSTLYIKGTNNRDPPPSSVYVATPSGSMVTSEAQLFNKPYWLQRAQGHNNGICWGNQVFVTVVDTTRNTNMTISATTQTLSTYNSSQIKQYVRHVEEYELQFVFQLCKISLSAETMAYLHTMNSTLLEGWNIGLSPPAATSLEDKYRYVKSLAITCQKDQPPAEKEDPLAKYKFWDVNLQDSFSADLDQFPLGRKFLMQLGVRTKPSTTTKKRSAPSSSTSTPSAKRKRR

SEQ ID NO: 1107 - protein, 96 aa, Human immunodeficiency virus
MEQAPENQGPQREPYNEWTLELLEELKSEAVKHFPRPWLHGLGQHIYETYGDTWAGVEAIIRILQQLLFIHFRIGCQHSRIGIIRQRRARNGASRS

SEQ ID NO: 1108 - protein, 161 aa, Human herpesvirus
MSQTQPPAPVGPGDPDVYLKGVPSAGMHPRGVHAPRGHPRMISGPPQRGDNDQAAGQCGDSGLLRVGADTTISKPSEAVRPPTIPRTPRVPREPRVPRPPREPREPRVPRAPRDPRVPRDPRDPRQPRSPREPRSPREPRSPREPRTPRTPREPRTARGSV

SEQ ID NO: 1109 - protein, 323 aa, Orf virus
MANRLVFLDPETLAEADGIPSQGVFEPGKKKCVFTKIRTSVALACRYAVSDGGLIDELVMATYGARRACRLVRHLTISAEGVMTRPASNCAPHMVLICLRGVAAVSSEDMVFGRCIMERGTMFMVKSAHSAVVCGNPACELLVLFYDHFTPIPRSLSGDEVLFTRDLAHVDYPPESAVVFKMDYDLATDVATLFVGGYIFRVRGLEMETREQVGDECDCCRHSSPVLVMDREKMMSSLRMIPSTVPGQRSICLRERGWAVLETDARGHCEPGVLRLALAGLRLFAGCLRSVVGRRELSLFCYGIVPKFGGEFDDAPRPMEIDG

SEQ ID NO: 1110 - protein, 235 aa, Human herpesvirus
MALGAGHAHACRDDGDDSVIDAPPPYESVAGASAGQFVVIDIDTPTDSPPPYSAGTSPVGLVSPASSGDGEVCERGRSRRAAWRAARRARRRAERRARRRSFGPGGLFVETPLFLPETMIGAHPGVGGDLPSGLPTYAEATSDRPPTYAMVMAACPTEPPGGSVGPADQPRVQSSRTWRPPLVNSRELYRAQRAARCASSSDTPQAPGWCGGTCRHAVFGVVAVVVVIILAFLWR

SEQ ID NO: 1111 - protein, 310 aa, Molluscum contagiosum virus
MEGDQLVLNSISAKALKAYLCQRLCEIVDEMVTRKAAPKKKQQTKKPEVRIPVDLIKPEFAARFGLHGYRDGVLASLIVSLVENNYFEAGKLKPGEHPELVILDIEREILARVPPESALNIDVGDVKTLAARLRTSAHCFEFRGHTYFLEHDKTEEIINQLVRNGALTLDARNSVKDSFYTISDELLDVLRARLFRCPQVKDNTISRTRLYDYLIRMTKPDESRLYVILRDARLAELLDIETVTVNHFVYTKHSLLVASVSAHVDKYSKRFGDAFYQGIAEYVKDNEKINVAKVVDYLTVSTVKCAALEE

SEQ ID NO: 1112 - protein, 641 aa, Epstein-Barr virus
MSDEGPGTGPGNGLGEKGDTSGPEGSGGSGPQRRGGDNHGRGRGRGRGRGGGRPGAPGGSGSGPRHRDGVRRPQKRPSCIGCKGTHGGTGAGAGAGGAGAGGAGAGGGAGAGGGAGGAGGAGGAGAGGGAGAGGGAGGAGGAGAGGGAGAGGGAGGAGAGGGAGGAGGAGAGGGAGAGGGAGGAGAGGGAGGAGGAGAGGGAGAGGAGGAGGAGAGGAGAGGGAGGAGGAGAGGAGAGGAGAGGAGAGGAGGAGAGGAGGAGAGGAGGAGAGGGAGGAGAGGGAGGAGAGGAGGAGAGGAGGAGAGGAGGAGAGGGAGAGGAGAGGGGRGRGGSGGRGRGGSGGRGRGGSGGRRGRGRERARGGSRERARGRGRGRGEKRPRSPSSQSSSSGSPPRRPPPGRRPFFHPVGEADYFEYHQEGGPDGEPDVPPGAIEQGPADDPGEGPSTGPRGQGDGGRRKKGGWFGKHRGQGGSNPKFENIAEGLRALLARSHVERTTDEGTWVAGVFVYGGSKTSLYNLRRGTALAIPQCRLTPLSRLPFGMAPGPGPQPGPLRESIVCYFMVFLQTHIFAEVLKDAIKDLVMTKPAPTCNIRVTVCSFDDGVDLPPWFPPMVEGAAAEGDDGDDGDEGGDGDEGEEGQE

SEQ ID NO: 1113 - protein, 76 aa, Vaccinia virus
MSWYEKYNIVLNPPKRCSSACADNLTTILAEDGNHIRAILYSQPKKLKVLQDFLATSRNKMFLYKILDDEIRRVLT

SEQ ID NO: 1114 - protein, 554 aa, Human papillomavirus
MLARQRVKRANPEQLYKTCKATGGDCPPDVIKRYEQTTPADSILKYGSVGVFFGGLGIGTGRGGGGTVLGAGAVGGRPSISSGAIGPRDILPIESGGPSLAEEIPLLPMAPRVPRPTDPFRPSVLEEPFIIRPPERPNILHEQRFPTDAAPFDNGNTEITTIPSQYDVSGGGVDIQIIELPSVNDPGPSVVTRTQYNNPTFEVEVSTDISGETSSTDNIIVGAESGGTSVGDNAELIPLLDISRGDTIDTTILAPGEEETAFVTSTPERVPIQERLPIRPYGRQYQQVRVTDPEFLDSAAVLVSLENPVFDADITLTFEDDLQQALRSDTDLRDVRRLSRPYYQRRTTGLRVSRLGQRRGTISTRSGVQVGSAAHFFQDISPIGQAIEPIDAIELDVLGEQSGEGTIVRGDPTPSIEQDIGLTALGDNIENELQEIDLLTADGEEDQEGRDLQLVFSTGNDEVVDIMTIPIRAGGDDRPSVFIFSDDGTHIVYPTSTTATTPLVPAQPSDVPYIVVDLYSGSMDYDIHPSLLRRKRKKRKRVYFSDGRVASRPK

SEQ ID NO: 1115 - protein, 300 aa, Yaba monkey tumor virus
MFRKERTLDIDLNPGLSTFIKHGFNTYVKWPLLNIGVVLNNTTTAVNEEWLTSIEHMPTRKIFYKYTCDVLKKKISFLVYINVSQTQEKNYISLYDFDFYVIDLDFTLKIVDKPKELKNTLLHIFQEYRVKNLQNIELIAFSSNTQINDKILENMNFLNIETFNREYNNIKPILSQKFVGCIPFIVTAPSGKLTFFIDDYEWINLKSHLNDIFNFLEEQLVFDVKSHKLETSVKENQNVSSYNSNSGTLYVNDLLTMCVVNFFGCNSRLNTYHRFDITKVDTYVFLNELSNAFKKIIDSI

SEQ ID NO: 1116 - protein, 47 aa, Human cytomegalovirus
MSLDAASHQPAARRLLDSALVRRVLACMIIVIMIAISIWILTYVLFL

SEQ ID NO: 1117 - protein, 430 aa, Orf virus
MDKYTDLVVSKIPELGFTNLLCHIYSVVGLSAHLDVSNFKTNCNGYVVRRFDESATAGRVSCIPLAALLDFAKRGLIDAAPPDTEKDEVAQKTALLASLKGRYGFREAIALEWKVPLGFFFKPSLREKVSEAVDFSQMPLNVDDLARAGVSTGVNTKVVPIAIKPDRGAWMSNVSIQSLVAPFAFGTEVAYLGQFNLNFLNGAAIHEKADRFRCNMISLTLKDKIERAGRRYVMFGFCYMFHWKCCIFDTVSRLVSFYDSGGNSPSEFHPCKYFYFYSFSDGFNVNAETADLDNRNCDVDVLMRFFVDNFKARRGCINLEVNQLMESECGMFTCIFMILCTIKHPDNFRTLRCIYTYFRFLADKKMTLLKSILFDPTAPKLEAVEVLSDGMKEYMKMERWTRKSVQVLSERITSRINSLLPPEPEKPAAP

SEQ ID NO: 1118 - protein, 124 aa, Human cytomegalovirus
RFTSRNTAPRWYKRDESGLATSIAAITTDFRCAPPTKRRTSYTPQKPARLRAPNLCVISTSQHDTNRVTWFPEHVRGTDPRHVLEDLTVYESIKQEKIRTLKLCVFIFPSPSFYQKTHFSSCKK

SEQ ID NO: 1119 - protein, 110 aa, Molluscum contagiosum virus
MHIRVLVLWTGHRCGNFAPANERCIVQGNMYRLCIRSAKRQRKKKPNVIQKKQQTSFRRGKTFPAPSVVLWGCLLSLFHLDTAGARRAAHAAARRARGHATTRGRQGAVS

SEQ ID NO: 1120 - protein, 641 aa, Epstein-Barr virus
MSDEGPGTGPGNGLGQKEDSSGPEGSGGSGPQRRGGDNHGRGRGRGRGRGGGRPGAPGGSGSGPRHRDGVRRPQKRPSCIGCKGAHGGTGSGAGAGGAGAGGAGAGGGAGAGGGAGGAGGAGGAGAGGGAGAGGGAGGAGGAGAGGGAGAGGGAGGAGAGGGAGGAGGAGAGGGAGAGGGAGGAGAGGGAGGAGGAGAGGGAGAGGAGGAGGAGAGGAGAGGGAGGAGGAGAGGAGAGGAGAGGAGAGGAGGAGAGGAGGAGAGGAGGAGAGEEAGGAGAGGGAGGAGAGGAGGAGAGGAGGAGAGGAGGAGAGGGAGAGGAGAGGGGRGRGGSGGRGRGGSGGRGRGGSGGRRGRGRERARGRSRERARGRGRGRGEKRPRSPSSQSSSSGSPPRRPPPGRRPFFHPVGDADYFEYLQEGGPDGEPDVPPGAIEQGPTDDPGEGPSTGPRGQGDGGRRKKGGWFGKHRGQGGSNPKFENIAEGLRVLLARSHVERTTEEGNWVAGVFVYGGSKTSLYNLRRGIALAVPQCRITPLSRLPFGMAPGPGPQPGPLRESIVCYFMVFLQTHIFAEVLKDAIKDLVMTKPAPTCNIKVTVCSFDDGVDLPPWFPPMVEGAAAEGDDGDDGDEGGDGDEGEEGQE

SEQ ID NO: 1121 - protein, 94 aa, Vaccinia virus; identical to SEQ ID NO: 364

SEQ ID NO: 1122 - protein, 460 aa, Human papillomavirus
MAHSRARRRKRASATQLYQTCKAAGTCPSDIIPKVEHNTIADQILKWGSLGVFFGGLGIGTGSGTGGRTGYIPLQSTPRPDIPSVPTARPPILVDTVAPGDPSIVSLVEESAIINSGAPELVPPSHAGFEITTSESTTPAILDVSVTTHTTSTSVFKNPSFADPSVVQSQPAVEAGGHILISTSSISSHPVEEIPLDTFIVSSSDSNPASSTPIPASGARPRIGLYSKALHQVQVTDPAFLSSPQRLITFDNPAYEGEDVTLHFAHNTIHEPPDDAFMDIIRLHRPAIQSRRGRVRFSRIGQRGSMYTRSGKHIGGRIHFYQDISPISAAAEEIELHPLVATAQDSGLFDIYAEPDPDVTEEPVSLSFSTSTPFQRSSVSATPWGNTTVPLSLPADMFVQPGPDIIFPTASTTTPYSPVTPALPTGPVFISGAAFYLYPTWYFARKRRKRVSLFFADVAA

SEQ ID NO: 1123 - protein, 75 aa, Yaba monkey tumor virus
MSDEDINESNFNHLLTNLSNNSEDGEFSATLMTIKEIISQINFKILSINKKSKKNFRPNDVTTSNYVSKRENVRY

SEQ ID NO: 1124 - protein, 185 aa, Vaccinia virus; identical to SEQ ID NO: 351

SEQ ID NO: 1125 - protein, 179 aa, Orf virus
MSRLQILTSFGQIYAPDEARLREIARDLGICTIKRAFGDMLYGFIDFNPVPLTQVNMLMSNCYFAVNGNLLPCTEDFRLRLPATEISAAYLTKTGRTILCGKDFNIIAPLGFKPSMRLRNLSHVSALVEILEFYSESGEYQFVLGPSAQFMLRLMEKENVCLFGSGWCIVDLRKLDVTI

SEQ ID NO: 1126 - protein, 123 aa, Human cytomegalovirus
MALVDQESCLRGFYSVFLRHCDVEPAIATFDGVRSPPDVVRLYPKPRYDYTLASAFLGTAVSGYITSRRDNAPNKNTGHRYVYTTSILIAVVTSVDTQHRSPSRCFMAMGESYFLQDEKCVFW

SEQ ID NO: 1127 - protein, 547 aa, Molluscum contagiosum virus
MNASIINSLIHAEDGVRRSNVFGFDMHQPTLYMPQYVTVSGVLQPDAGAHPVVAYEVRDQYITAMNNMVLAIELPEVKGVGRFAYIPHVGYKCIRNVALTSVNGTVWEVSGEELFDSVRGHAAALELAGHSRELNDITRGDSPNDTIKDASTVYVYLRSPFDCDHTFSSLKLSDAKVTLAVTFNPISDVLVYDAAFDLDAFLRSFVYATELSFVGYMVRNIHAKPSFLEITRRQVGQMNLPTAVVTDVHAATALAVYVKPYYGPVENKFIAYPGFSQSEQSYVCAFVERLLEDLIRISDAEPSGFPEAAELVEVPPGGLVSIQDVDVLVRIDGVPAGKTVFFHTNLLVFGTRRNSFMYNLSKKFSVIAGCFSPATGKIIFTSVQHTVSVTDASIPVGFWSSPKNVYHGDNRSCSSRAKDIFVNDPFLKGVDFLNKAEVISRMEVRFGNDVMYSEIAPISRVYNQVLHGAHCGTRKLLFNFNPGAFFRPTTLTANPSRGKDKLAVRVVYSSMDPNNPISYVPKQLVVVCTDLHRVTYDPYIRVSKVSE

SEQ ID NO: 1128 - protein, 454 aa, Epstein-Barr virus
MPTYYLALHGGQSYNLIVDTDMSGNPSLSVIPTNPYQEQLSNNPLIQLQIVVGENTGAPAPPQPPPPPPPPPPPERRDAWTQEPLPLDMNPLGSDASQGPLASSIRMLCMAQYLLRNARGQQGLLRPLGPQTRSQVTLERQPVHNPRQEAPIILLQSPAPPRFTPVPMVALGHTLQPTPPPRPTLPQPRIPLIIPPRHTNQPATTPPTAPQRLTLGHQLSLPPHPPPHQSTPHCSSDSTGLPPPPTSYSIPSMTLSPEPLPPPAAPAHPLPGVIYDQQALPPTPGPPWWPPVRDPTPTTQTPPTNTKQGPDQGQGRGRWRGRGRSKGRGRMHKLPEPRRPGPDTSSPSMPQLSPVVSLHQGQGPENSPTPGPSTAGPVCRVTPSATPDISPIHEPESSDSEEPPFLFPSDWYPPTLEPAELDESWEGIFETTESHSSDEENVGGPSKRPRTSTQ

SEQ ID NO: 1129 - protein, 207 aa, Human papillomavirus type
MCGLIIMKIIHFPIQIGNIFTIRMILNNGTGPEERWTIMDFISQKIMEIEHIFSYLIVMHKHIHKLGHGQCIIKTKLFLLLLPAPQNNPPTTTLPKPGSNPTSSPHPHRRLLPTEDRPHKRESLALPRRRVLFDYDAEDPTSNKENYPPESRPVPKDAEYPTKSTDRVPWGLPQLLKRWEADIDLFLEAVYQDLQDFKEKLGILQSC

SEQ ID NO: 1130 - protein, 518 aa, Human papillomavirus
MARAKTVKRDSVTHIYQTCKQAGTCPPDVINKVEQTTVADNILKYGSAGVFFGGLGISTGRGTGGATGYVPLGEGPGVRVGGTPTVVRPSLVPETIGPVDILPIDTVNPVEPTASSVVPLTESTGADLLPGEVETIAEIHPVPEGPSVDTPVVTTSTGSSAVLEVAPEPIPPTRVRVSRTQYHNPSFQIITESTPAQGESSLADHVLVTSGSGGQRIGGDITDIIELEEIPSRYTFEIEEPTPPRRSSTPLPRNQSVGRRRGFSLTNRRLVQQVQVDNPLFLTQPSKLVRFAFDNPVFEEEVTNIFENDLDVFEEPPDRDFLDVRELGRPQYSTTPAGYVRVSRLGTRATIRTRSGAQIGSQVHFYRDLSSINTEDPIELQLLGQHSGDATIVHGPVESTFIDMDISENPLSESIEAYSHDLLLDETVEDFSGSQLVIGNRRSTNSYTVPRFETTRNGSYYTQDTKGYYVAYPESRNNAEIIYPTPDIPVVIIHPHDSTGDFYLHPSLHRRKRKRKYL

SEQ ID NO: 1131 - protein, 266 aa, Yaba monkey tumor virus
MHTYNYIIFFLFKLISCSYIRVNYTTCNSVVNVVCDVKLPYNSAVEWRFNNKVIFYSNNTLKFKFNNNLFGNYTCKTFDVFNKIELKLITEWITSEEKIIISSMLIAYLIISWMTILTLSFKIDRLKRVINLHAILIWITILGVYIQYMLKLSKGYSFIDVCGIVLITVLLFSSIFVNVLTLLKIKKKKCFIVIIILKTITSVLFFLTTLVILFYCYKSIFGSLLIYKLLIINVFELSHLVILFILPVEFKIEYKKLIILNSNLNL

SEQ ID NO: 1132 - protein, 125 aa, Variola virus
MAVCIIDHDNIRGVIYFEPVHGKDKVLGSVIGLKSGTYNLIIHRYGDISRGCNSIGSPEIFIGNIFVNRYGVAYVYLDTDVNISTIIGKALSISKNDQRLACGVIGISYINEKIIHFLTINENGV

SEQ ID NO: 1133 - protein, 90 aa, Orf virus
MEENDGENLLAQPDDDTGNSTNGVYAAGAPTKESVEERLVSLLDSYKTITDCCRETGNRLDRLEKHLETLRRALLDLNRKIDVQTGYSRY

SEQ ID NO: 1134 - protein, 149 aa, Human cytomegalovirus
MMLRTWISLPMVLLDAYCFCIFVSCSISTTTAPVEWKSPDRQIPMNITCANYSGTVNGNVTFRGLQNKTEDFLHWLLGWGHKSICSFFPKLQGNKEQHYMYGITNLTYNCTYDRLTLLNLTTENSGKYYFKREDVNSTFYYSCYNLTVT

SEQ ID NO: 1135 - protein, 250 aa, Punta toro phlebovirus
MSNINYYARELPIMSTSPNQLKRVTVDFVPFGKRHNAPVSLYKGMEIPLHNLRQSVIAKNRLITFLNNYDLPKEWGYEQGLVIKASPSFFDVTIARISMLDVKDALKWCEPNIKRALSWPLTYPTFKFFEFSTLDGYQLNWEKKCDFATQICRVGKGLGLDDSLMFTYKTMMRELSVRNIPAEVFTGQAIEKEIAYIQLIRLMTALEHDKRDDCCQSELFKLVELQYEVTSKELLGNRLWLPLTMLNQDI

SEQ ID NO: 1136 - protein, 946 aa, Epstein-Barr virus [sequence omitted]

SEQ ID NO: 1137 - protein, 74 aa, Variola virus
MIPLLFILFYFANGIEWHKFETSEKIISTYLIDDVLYTGVNGAVYTFSNNKLNKTGLANTNYITTSIKVEDVIH

SEQ ID NO: 1138 - protein, 525 aa, Human papillomavirus
MYARVKRVKRDSVENLYKQCQLGADCPPDVRNKVEGTTLADRLLQIFGSILYLGNLGIGTGKGSGGATGYTPLGTARVPASTPGTVIKPTRPFSVPLDPIGSGIPSQPVGGRLPVDIIDASASSIIPLQEVLPETTIIVGGDSGPGLGASEIDIVSEPRPDVVGVDTQPTVYTSIDNTVATLDITPATPPVKKIILDPISSGSEGAAAITFSDISAADLNVFVDPQGAGDRISFGEEIELGPINQPAQFEIEEPPRTSTPGEGFQRVTTRARELYNRFVQQQPTQNIDFLGRPSRAVQFEFENPAFFNDEVTMQFEQDLQEVAAAPDQDFADVRELGRARFSETSAGTIRVSRLGTKGTMKTRSGLTIGQKVHFYFDISDIPAAETIQLRTLGESSHDFSAVDNITESTYINLTETTNEGLIPDNILEDEFTENFNNAQLIFATIDEGESMIMPTIPPGVALKLFIPEIAASVLNVVHPSSEWTILIPNVPDEIIQPAMAVDVYDDFYLHPHLLRRRKRKRLDFF

SEQ ID NO: 1139 - protein, 238 aa, Yaba monkey tumor virus
MMEHYSNFFVYITQNNRKLSKTYTIIDDSQRVFATGFNNQVLKFIKKISVCAILVTSDNKYIACSRNSSFLFSEIIRSKNQFRKKRLFLKYPNYLKKTERQILSSELNIKLSHDIEKDYSNIIFPGGMPKNGENVLSCLSREIKEEINVDNRHIFLDLRFFLHLLIEDLLTDKVYETILFMGKTTLSSKEISNNFLSNKEIKSLVFFDKSEDGLICEIVRLALSISKLKCFGNNGIKC

SEQ ID NO: 1140 - protein, 1173 aa, Human coronavirus
MFVLLVAYALLHIAGCQTTNGLNTSYSVCNGCVGYSENVFAVESGGYIPSDFAFNNWFLLTNTSSVVDGVVRSFQPLLLNCLWSVSGLRFTTGFVYFNGTGRGDCKGFSSDVLSDVIRYNLNFEENLRRGTILFKTSYGVVVFYCTNNTLVSGDAHIPFGTVLGNFYCFVNTTIGNETTSAFVGALPKTVREFVISRTGHFYINGYRYFTLGNVEAVNFNVTTAETTDFCTVALASYADVLVNVSQTSIANIIYCNSVINRLRCDQLSFDVPDGFYSTSPIQSVELPVSIVSLPVYHKHTFIVLYVDFKPQSGGGKCFNCYPAGVNITLANFNETKGPLCVDTSHFTTKYVAVYANVGRWSASINTGNCPFSFGKVNNFVKFGSVCFSLKDIPGGCAMPIVANWAYSKYYTIGSLYVSWSDGDGITGVPQPVEGVSSFMNVTLDKCTKYNIYDVSGVGVIRVSNDTFLNGITYTSTSGNLLGFKDVTKGTIYSITPCNPPDQLVVYQQAVVGAMLSENFTSYGFSNVVELPKFFYASNGTYNCTDAVLTYSSFGVCADGSIIAVQPRNVSYDSVSAIVTANLSIPSNWTTSVQVEYLQITSTPIVVDCSTYVCNGNVRCVELLKQYTSACKTIEDALRNSARLESADVSEMLTFDKKAFTLANVSSFGDYNLSSVIPSLPTSGSRVAGRSAIEDILFSKLVTSGLGTVDADYKKCTKGLSIADLACAQYYNGIMVLPGVADAERMAMYTGSLIGGIALGGLTSAVSIPFSLAIQARLNYVALQTDVLQENQKILAASFNKAMTNIVDAFTGVNDAITQTSQALQTVATALNKIQDVVNQQGNSLNHLTSQLRQNFQAISSSIQAIYDRLDTIQADQQVDRLITGRLAALNVFVSHTLTKYTEVRASRQLAQQKVNECVKSQSKRYGFCGNGTHIFSIVNAAPEGLVFLHTVLLPTQYKDVEAWSGLCVDGTNGYVLRQPNLALYKEGNYYRITSRIMFEPRIPTMADFVQIENCNVTFVNISRSELQTIVPEYIDVNKTLQELSYKLPNYTVPDLVVEQYNQTILNLTSEISTLENKSAELNYTVQKLQTLIDNINSTLVDLKWLNRVETYIKWPWWVWLCISVVLIFVVSMLLLCCCSTGCCGFFSCFASSIRGCCESTKLPYYDVEKIHIQ

SEQ ID NO: 1141 - protein, 2769 aa, Human herpesvirus
MDIIPPIAVTVAGVGSRNQFDGALGPASGLSCLRTSLSFLHMTYAHGINATLSSDMIDGCLQEGAAWTTDLSNMGRGVPDMCALVDLPNRISYIKLGDTTSTCCVLSRIYGDSHFFTVPDEGFMCTQIPARAFFDDVWMGREESYTIITVDSTGMAIYRQGNISFIFDPHGHGTIGQAVVVRVNTTDVYSYIASEYTHRPDNVESQWAAALVFFVTANDGPVSEEALSSAVTLIYGSCDTYFTDEQYCEKLVTAQHPLLLSPPNSTTIVLNKSSIVPLHQNVGESVSLEATLHSTLTNTVALDPRCSYSEVDPWHAVLETTSTGSGVLDCRRRRRPSWTPPSSEENLACIDDGLVNNTHSTDNLHKPAKKVLKFKPTVDVPDKTQVAHVLPRLREVANTPDVVLNVSNVDTPESSPTFSRNMNVGSSLKDRKPFLFEQSGDVNMVVEKLLQHGHEISNGYVQNAVGTLDTVITGHTNVPIWVTRPLVMPDEKDPLELFINLTILRLTGFVVENGTRTHHGATSVVSDFIGPLGEILTGFPSAAELIRVTSLILTNMPGAEYAIKTVLRKKCTIGMLIIAKFGLVAMRVQDTTGALHAELDVLEADLGGSSPIDLYSRLSTGLISILNSPIISHPGLFAELIPTRTGSLSERIRLLCELVSARETRYMREHTALVSSVKALENALRSTRNKIDAIQIPEVPQEPPEETDIPPEELIRRVYEIRSEVTMLLTSAVTEYFTRGVLYSTRALIAEQSPRRFRVATASTAPIQRLLDSLPEFDAKLTAIISSLSIHPPPETIQNLPVVSLLKELIKEGEDLNTDTALVSWLSVVGEAQTAGYLSRREFDELSRTIKTINTRATQRASAEAELSCFNTLSAAVDQAVKDYETYNNGEVKYPEITRDDLLATIVRATDDLVRQIKILSDPMIQSGLQPSIKRRLETRLKEVQTYANEARTTQDTIKSRKQAAYNKLGGLLRPVTGFVGLRAAVDLLPELASELDVQGALVNLRTKVLEAPVEIRSQLTGDFWALFNQYRDILEHPGNARTSVLGGLGACFTAIIEIVPIPTEYRPSLLAFFGDVADVLASDIATVSTNPESESAINAVVATLSKATLVSSTVPALSFVLSLYKKYQALQQEITNTHKLTELQKQLGDDFSTLAVSSGHLKFISSSNVDDYEINDAILSIQTNVHALMDTVKLVEVELQKLPPHCIAGTSTLSRVVKDLHKLVTMAHEKKEQAKVLITDCERAHKQQTTRVLYERWTRDIIACLEAMETRHIFNGTELARLRDMAAAGGFDIHAVYPQARQVVAACETTAVTALDTVFRHNPYTPENTNIPPPLALLRGLTWFDDFSITAPVFTVMFPGVSIEGLLLLMRIRAVVLLSADTSINGIPNYRDMILRTSGDLLQIPALAGYVDFYTRSYDQFITESVTLSELRADIRQAAGAKLTEANKALEEVTHVRAHETAKLALKEGVFITLPSEGLLIRAIEYFTTFDHKRFIGTAYERVLQTMVDRDLKEANAELAQFRMVCQATKNRAIQILQNIVDTANATEQQEDVDFTNLKTLLKLTPPPKTIALAIDRSTSVQDIVTQFALLLGRLEEETGTLDIQAVDWMYQARNIIDSHPLSVRIDGTGPLHTYKDRVDKLYALRTKLDLLRRRIETGEVTWDDAWTTFKRETGDMLASGDTYATSVDSIKALQASASVVDMLCSEPEFFLLPVETKNRLQKKQQERKTALDVVLQKQRQFEETASRLRALIERIPTESDHDVLRMLLRDFDQFTHLPIWIKTQYMTFRNLLMVRLGLYASYAEIFPPASPNGVFAPIPAMSGVCLEDQSRCIRARVAAFMGEASVVQTFREARSSIDALFGKNLTFYLDTDGVPLRYRVCYKSVGVKLGTMLCSQGGLSLRPALPDEGIVEETTLSALRVANEVNELRIEYESAIKSGFSAFSTFVRHRHAEWGKTNARRAIAEIYAGLITTTLTRQYGVHWDKLIYSFEKHHLTSVMGNGLTKPIQRRGDVRVLELTLSDIVTILVATTPVHLLNFARLDLIKQHEYMARTLRPVIEAAFRGRLLVRSLDGDPKGNARAFFNAAPSKHKLPLALGSNQDPTGGRIFAFRMADWKLVKMPQKITDPFAPWQLSPPPGVKANVDAVTRIMATDRLATITVLGRMCLPPISLVSMWNTLQPEEFAYRTQDDVDIIVDARLDLSSTLNARFDTAPSNTTLEWNTDRKVITDAYIQTGATTVFTVTGAAPTHVSNVTAFDIATTAILFGAPLVIAMELTSVFSQNSGLTLGLKLFDSRHMATDSGISSAVSPDIVSWGLRLLHMDPHPIENACLIVQLEKLSALIANKPLTNNPPCLLLLDEHMNPSYVLWERKDSIPAPDYVVFWGPESLIDLPYIDSDEDSFPSCPDDPFYSQIIAGYAPQGPPNLDTTDFYPTEPLFKSPVQVVRSSKCKKMPVRPAQPVQPAQPVQPAQPVQPAQPVQPAQPIEPGTQIVVQNFKKPQSVKTTLSQKDIPLYVETESETAVLIPKQLTTSIKTTVCKSITPPNNQLSDWKNNPQQNQTLNQAFSKPILEITSIPTDDSISYRTWIEKSNQTQKRHQNDPRMYNSKTVFHPVNNQLPSWVDTAADAPQTDLLTNYKTRQPSPNFPRDVHTWGVSSNPFNSPNRDLYQSDFSEPSDGYSSESENSIVLSLDEHRSCRVPRHVRVVNADVVTGRRYVRGTALGALALLSQACRRMIDNVRYTRKLLMDHTEDIFQGLGYVKLLLDGTYI

SEQ ID NO: 1142 - protein, 166 aa, Human cytomegalovirus
MFLGYSDCVDPGLAVYRVSRSRLKLVLSFVWLVGLRLHDCAAFESCCYDITEAESNKAISRDKAAFTSSVSTRTPSLAIAPPPDRSMLLSREEELVPWSRLIITKQFYGGLIFHTTWVTGFVLLGLLTLFASLFRVPQSICRFCIDRLRDIARPLKYRYQRLVATV

SEQ ID NO: 1143 - protein, 53 aa, Molluscum contagiosum virus
MITSYEPLLLLCCVGASLAANRLLSRASKLDAVFSVHAVFFLWFLFHFLYSVF

SEQ ID NO: 1144 - protein, 147 aa, Vaccinia virus
MFNMNINSPVRFVKETNRAKSPTRQSPGAAGYDLYSAYDYTIPPGERQLIKTDISMSMPKICYGRIAPRSGLSLKGIDIGGGVIDEDYRGNIGVILINNGKCTFNVNTGDRIAQLIYQRIYYPELEEVQSLDSTNRGDQGFGSTGLR

SEQ ID NO: 1145 - protein, 452 aa, Variola virus
MFNYLENEEVALDELKQMLKDRDPNDTRNQFKNNALHAYLFNEHCNNVEVVKLLLDSGTNPLHKNWRHFTPLEEYTNSRHVKVNKDIAMALLEATGFSNINNFNIFNYMKSKNVNVDLIKVLVEHGFDLSVKCENHRSVIENYVMTDDPVPEIIDLFIENGCNVLYEDDEYGYTYDDYQPQNCGTVLHLYIISHLYSESDTRAYVRPEVVKCLINHGIKPSSIDKNYCTALQYYIKSSHIDIDIVKLLMKGIDNTAYSYIDDLTRCTRVIMADYLNSDYRYNEDVNLDLVKLFLENGKPHGIMCSIVPLWRNDKETISLILKTMNSNILQHILIEYMTFDDIDIHLVECMLAYGAVVNKEAIHGYFRNINIDSYTMKYLLKKKGGDVINYLDDGEIPIGHLCKSNYGCYNFYTYIYKKGLCVMSYACPILNTINICLPYLKDINMIDKRGQQ

SEQ ID NO: 1146 - protein, 459 aa, Human papillomavirus
MALKRRKRASATDLYRTCKQSGTCPPDVVPKVEGDTLADRILKWASLGVFFGGLGIGTGSGTGGRTGYVPIGTRPPTVVDIGPVSRPPVVIDPVGAADPSIVTLVEESSVIEAGATVPTFSGSGGFNVTSSSTTTPAVLDITPSGGSVQVSSTSFINPLFTEPSIIEPPQAGDLAGHVISSTPTAGSHSFEEIPMHTFATSEGPGSSTPLPGIRRLARPRLNLYSKANQQIKVANPTFMSDPASLITYDNPIFDPEETIIFEHPSIYTPPDPDFLDIVSLHRPALTSRQGTVRFSRLGQRATLRTRSGRRIGARVHFYHDISPIPSDAVELQPLVPSSSPSITYDIYADPEVLDLPAQHTQPTLTVQGPSLSAASASTKVHNVTVPLATGLDTPVTSGPDVDFAHAPAPVPAVPYVPATHPHSIYIQGSDFYLLPAYVFFPKRRKRVPYSFSDGFVAAW

SEQ ID NO: 1147 - protein, 58 aa, Yaba monkey tumor virus
MQFENTLLVIAIIMMLLGVASMIVDTVIFINSYFVKKRKCINKNDETKPLLNKTMYEK

SEQ ID NO: 1148 - protein, 229 aa, Human adenovirus
MAPKKKLQLPPPPTDEEEYWDSQAEEVLDEEEEDMMEDWESLDEEASEVEEVSDETPSPSVAFPSPAPQKSATGSSMATTSAPQAPPALPVRRPNRRWDTTGTRAAHTAPAAAAAAATAAATQKQRRPDSKTLTKPKKSTAAAAAGGGALRLAPNEPVSTRELRNRIFPTLYAIFQQSRGQEQELKIKNRSLRSLTRSCLYHKSEDQLRRTLEDAEALFSKYCALTLKD

SEQ ID NO: 1149 - protein, 841 aa, Orf virus
MVSVMRKPRPASVAMRMYGATSTLFFFMTFSVRSASSDRNCRLTSRDVRKSSRCRKKPSDSLRSSSLLRCGYMRLLRAKKTVFSRAPARVASTLTSPRSMSASAAMSGTGWNMALPRDPRILFQFNAGYKYARATMLYTVAPQLVVLVGRHQEIERVLYLSLYDSVDEASPIYFFAKQYIQKDPEHVRRHILLTMRVRQLKGYLGSLLGLQDEIIVYSHKNNLEYSYVDNTIFNPFSPTQKKTLIRTDGILYNAYADACNFLVVWVARAADTSAPEFGSFEEPNDSILKFEERLIREFANLDLNMNVETKFNNIFRTNLRESGLRAIAQQSPDKRAEVGDFDILLSKTDDFFVSMTGTRFMLVDEPLNLSVWGPEGDLVISSDGKTLTVNDVGLFTKLIESMDVKMDRVKGDITYKVSLNTTITSKMKLDMETSFIFVETATNNILLSTDKRISIILAKSHVSVKVKNYIPNIEKYFTFLIVAISVMFNNVKQSSDFTKVETVYWSRICQNTKTKNRKPVIVQSLDADMAKVSNNFFKSETREVFVNGNGVMFSCMDPDGRYNSVGFLSIFHRLQRICIPCCFLRSQAHTDTFKSCVYDEEVDRSALNPYILNFGKVVTESKLSFLPIIFDKYFNEGLEADFEADNKRLRATAGYYVVHCCEGAIVRLRTVSEIVSYVNASGNVLISGDMVYFPMRLADTAATRILIQEIVHDVVRIRKDAATDAIHLDQDASGRLASMFPHKAARRVVREENGLSLTTSGFFVDGKRFAPKLTSRFTAFVRNATVPNAVSRHFAKLFRHVVTDAPDRFMKTWSVNCALKLGVEPDSARAPALLQEFYPQP

SEQ ID NO: 1150 - protein, 125 aa, Human cytomegalovirus
MMTDRTERRRRLTHAACTPSANNQRTTRLPPHPGFFSWSNPACDDGLFLYRTTVSRGVDTQRRRRSHPGFFSCRYHPSTVSLARRHRGPGKRISLRTEISKDADPISTVTETRWFLLNFQCIEPP

SEQ ID NO: 1151 - protein, 122 aa, Cercopithecine herpesvirus
MTRADIATPRPPIRHTGADGRPNAATRGARAERPDVPIGVAEDLRVLAETCGPAGAKAGPGDGVSRRRVAAVAAPPPLPLEPVDAPVYLVTWLALRWVRGTLGLGAVLCGVAYYMTSALRGA

SEQ ID NO: 1152 - protein, 132 aa, Human adenovirus
MKFTVTFLLIICTLSAFCSPTSKPQRHISCRFTRIWNIPSCYNEKSDLSEAWLYAIISVMVFCSTILALAIYPYLDIGWKRIDAMNHPTFPAPAMLPLQQVVAGGFVPANQPRPTSPTPTEISYFNLTGGDD

SEQ ID NO: 1153 - protein, 531 aa, Aichi virus
MAVLHSGVVCLDGWFYLRLLHRYVNFPVGYLPCFVLTFTSGQIAGFTTMNDFKMRFAEQHADGTYAFSNVRNGLIVGLLSIGTMIGALVAAPIADRIGRKYSISFWSVIHMVGIIIQIATDDNWVQVAMGRWVAGLVVGALSSIVPMYQSESAPRQVRGAMVSAFQLFVASVFSSLISSTSVPNPSTVPLPGVSLWDMCAWPLILGVGTLFLPESPRYAYRNGRVEEAREVMCKLYGVGPNHRCIAQEMKDMKDKLDEEKAAGQAWHFEVFTGPRMFYRVAGIALQSLQQLTGANFLFYYGNTIFTSTGLNNSYVTQIILGAVNFGMTLPGLYVVEHFGRRNSLMVGASWMFICFMIWASIGHFALDLENPPNTPQAGTAMIVFTCFFIGGFATTWGPIVWAICGEMYPARYRAVCIGLATAANWSLNFLISFFNPIHLQRYRLCYGYVFAGCCFAAVLVVFFFVNETQGRTLEEVDTMYVLHVKPWKSASWTPRRVSSVISTDPPLPPSRRVGLSTASPPPRSASKWYHV

SEQ ID NO: 1154 - protein, 223 aa, Human coronavirus
MNKSFLPQFTSDQAVTFLKEWNFSLGVILLFITIILQFGYTSRSMFVYLIKMIILWLMWPLTITLTIFNCFYALNNAFLAFSIVFTIISIVIWILYFVNSIRLFIRTGSWWSFNPETNNLMCIDMKGKMFVRPVIEDYHTLTATVIRGHLYIQGVKLGTGYTLSDLPVYVTVAKVQVLCTYKRAFLDKLDVNSGFAVFVKSKVGNYRLPSSKPSGMDTALLRA

SEQ ID NO: 1155 - protein, 128 aa, Human adenovirus
MIEPDLQMDGTMTEQRLLADRARRRQQDQKNKELLDLQTVHQCKKGLFCLVKQATLRYENLPGKEHQLCYTLPTQRQSFTAVVGSVPIKVSQQAGQQEGSICCLCTSPECLYTLIKTLCGIRKLLPMN

SEQ ID NO: 1156 - protein, 353 aa, Vaccinia virus
MTMKMMVHIYFVSLSLLLLLFHSYAIDIENEITEFFNKMRDTLPAKDSKWLNPACMFGGTMNDMATLGEPFSAKCPPIEDSLLSHRYKDYVVKWERLEKNRRRQVSNKRVKHGDLWIANYTSKFSNRRYLCTVTTKNGDCVQGIVRSHIKKPPSCIPKTYELGTHDKYGIDLYCGILYAKHYNNITWYKDNKEINIDDIKYSQTGKELIIHNPELEDSGRYDCYVHYDDVRIKNDIVVSRCKILTVIPSQDHRFKLILDPKINVTIGEPANITCTAVSTSLLIDDVLIEWENPSGWLIGFDFDVYSVLTSRGGITEATLYFENVTEEYIGNTYKCRGHNYYFEKTLTTTVVLE

SEQ ID NO: 1157 - protein, 194 aa, Orf virus
MRLILALVACLLAAPMPLSGRSTSTPNTPSALGSTSATPSSEDAAASSTTTSTTSTLTSSTSVDTTTTSGATTSNSTSAASVSSSTSATTEASTAPTTPLTPTTVKVTNGKENKASAYLAVPVMFMTMTTLAMVVVVVVLMYKQGLCNCFCKMFPCCKELKDYLDEEESAGLYDAVTWSHSNPGFRLVTRTDPR

SEQ ID NO: 1158 - protein, 150 aa, Human cytomegalovirus
KLPYSITVTYDHRTSPHIPFSSHIGKQNSFFSFLSRKKSMYHHITFCSVPATDGRARGQRPTGHFHLFFVVNRLLPRTRSTTKPSCSFAQPVTPRTREGAGVRGHRRRRRGSLSLIPWKTSNDKQKDDKRSLFCYMREIIAVGNFSKYML

SEQ ID NO: 1159 - protein, 487 aa, Cercopithecine herpesvirus
MESLFDELFADMDTDGDSPPRRPTGTAELPDAATAPRPYATGRLSQAQIMPQPPVPVPPAALYNRLLEDLGFGDGPALCTILDSWNEDLFSGLPANPDLYRECQFLSTLPSDVVAWGDGHTPDRGPIDIRAHGSAPFPSLPARREDLPAYCEALTRFFRAELRAREESYRRVLANFCSALYRYLRASTRQLHRQAALKGRPRDLQEMLRAAVAERYYRETARLARVLFLHLYLFLVREILWAVYAEQVMRQDLFEGLCCDLEQARQLSCLFQPLLFVHGTVSVRGAAVAPARLREINYVRERLNLPLVRSAATEEPGAALTAAPALQTQRARSSGYFMTLIRVKLDAYSEGSGSEGAEVLREHAYSRRRERTNYGSSIEGLLELPDDTDYDPDAPPPPPRLSFAAAPPRRRSAAPRTDVSLGDELRFDGDVSMTPSEALDDFDLTLLGDDDHAGGLDDAAAYASLDMADFEFEQMFTDALGIDDIGG

SEQ ID NO: 1160 - protein, 110 aa, Human adenovirus
MKTALVLFFMLIPVWASSCQLHKPWNFLDCYTKETNYIGWVYGIMSGLVFVSSVVSLQLYARLNFSWNKYTDDLPEYPNPQDDLPLNIVFPEPPRPPSVVSYFKFTGEDD

SEQ ID NO: 1161 - protein, 716 aa, Influenza A virus
MEDFVRQCFNPMIVELAEKAMKEYGEDLKIETNKFAAICTHLEICFMYSDFHFINEQGESIVVELDDPNALLKHRFEIIEGRDRTMAWTVVNSICNTTGAEKPKFLPDLYDYKENRFIEIGVTRREVHIYYLEKANKIKSENTHIHIFSFTGEEMATKADYTLDDESRARIKTRLFTIRQEMANRGLWDSFRQSERGEETIEERFEITGTMRRLADQSLPPNFSCLENFRAYVDGFEPNGCIEGKLSQMSKEVNARIEPFLKTTPRPIKLPDGPPCFQRSKFLLMDALKLSIEDPSHEGEGIPLYDAIKCMRTFFGWKEPYIVKPHEKGINPNYLLSWKQVLAELQDIENEEKIPRTKNMKKTSQLKWALGENMAPEKVDFDNCRDISDLKQYDSDEPELRSLSSWIQNEFNKACELTDSIWIELDEIGEDVAPIEYIASMRRNYFTAEVSHCRATEYIMKGVYINTALLNASCAAMDDFQLIPMISKCRTKEGRRKTNLYGFIIKGRSHLRNDTDVVNFVSMEFSLTDPRLEPHKWEKYCVLEIGDMLLRSAIGQMSRPMFLYVRTNGTSKIKMKWGMEMRRCLLQSLQQIESMIEAESSVKEKDMTKEFFENKSETWPIGESPKGVEEGSIGKVCRTLLAKSVFNSLYASPQLEGFSAESRKLLLVVQALRDNLEPGTFDLGGLYEAIEECLINDPWVLLNASWFNSFLTHALR

SEQ ID NO: 1162 - protein, 226 aa, Human coronavirus
MSNSSVPLLEVYVHLRNWNFSWNLILTLFIVVLQYGHYKYSRLLYGLKMSVLWCLWPLVLALSIFDCFVNFNVDWVFFGFSILMSIITLCLWVMYFVNSFRLWRRVKTFWAFNPETNAIISLQVYGHNYYLPVMAAPTGVTLTLLSGVLLVDGHKIATRVQVGQLPKYVIVATPSTTIVCDRVGRSVNETSQTGWAFYVRAKHGDFSGVASQEGVLSEREKLLHLI

SEQ ID NO: 1163 - protein, 203 aa, Human adenovirus
MGSSEQELTAIVRDLGCGPYFLGTFDKRFPGFVSRDRLSCAIVNTAGRETGGVHWLAFAWNPKSHTCYLFDPFGFSDQRLKQIYQFEYESLLRRSALAATNDRCVTLEKSTQTVQGPFSAACGLFCCMFLHAFTHWPDHPMDKNPTMNLLTGVPNSMLQSPQVEDTLRRNQQELYIFLNKLSPYFRNNRQRIEKATSFTKMKN

SEQ ID NO: 1164 - protein, 403 aa, Vaccinia virus
MIPLLFILFYFANGIEWHKFETSEEIISTYLLDDVLYTGVNGAVYTFSNNKLNKTGLTNNNYITTSIKVEDADKDTLVCGTNNGNPKCWKIDGSDDPKHRGRGYAPYQNSKVTIISYNECVLSDINISKEGIKRWRRFDGPCGYDLYTADNVIPKDGLRGAFVDKDGTYDKVYILFTDTIGSKRIVKIPYIAQMCLNDEGGPSSLSSHRWSTFLKVELECDIDGRSYRQIIHSRTIKTDNDTILYVFFDSPYSKSALCTYSMNTIKQSFSTSKLEGYTKQLPSPAPGICLPAGKVVSHTTFEVIEKYNVLDDIIKPLSNQPIFEGPSGVKWFDIKEKENEHREYRIYFIKENSIYSFDTKSKQTRSSQVDARLFSVMVTSKPLFIADIGIGVGMPQMKKILKM

SEQ ID NO: 1165 - protein, 63 aa, Orf virus
MVFPIVCSTCGRDLSHERFLLIVRQRPLKVVLRTVRNVCCRIKLSTQIEPHRNLTVLPMLDIS

SEQ ID NO: 1166 - protein, 123 aa, Human cytomegalovirus
GHRRPRRRVYSVRCDHCVEPEKARLARRLRIGSRVCGIPKNIISWSSFFDVLLSSRSCFVFFFLFSRWNFSSVRVLVMEACVFEHEFEKIKRPIFVSKKGQISIFLTYIMVNSESYGVLLSLK

SEQ ID NO: 1167 - protein, 227 aa, Cercopithecine herpesvirus
MAGLLGALCGWGTHPREQYEMVRVAAPPSEAEPRLREALTVVNALLPAPITLDDALESLDETRRLVKARALARTYHACMVNLERLARHQLGADAASLDGAVEAHRAKMRRLADTCLATILQMYMSVGAADKSADVLVAQAIRSMAESDVVMEDVAIAERALGIGGESATAAARPVGLAAPAVSAAAPSPTVPAIPPPPTAESTHKATAAAPPERPKAPPTDRLVALA

SEQ ID NO: 1168 - protein, 159 aa, Human adenovirus; identical to SEQ ID NO: 623

SEQ ID NO: 1169 - protein, 8 aa, Influenza A virus
MASQGTKR

SEQ ID NO: 1170 - protein, 303 aa, Lake Victoria marburgvirus
MASSSNYNTYMQYLNPPPYADHGANQLIPADQLSNQQGITPNYVGDLNLDDQFKGNVCHAFTLEAIIDISAYNERTVKGVPAWLPLGIMSNFEYPLAHTVAALLTGSYTITQFTHNGQKFVRVNRLGTGIPAHPLRMLREGNQAFIQNMVIPRNFSTNQFTYNLTNLVLSVQKLPDDAWRPSKDKLIGNTMHPAVSIHPNLPPIVLPTVKKQAYRQHKNPNNGPLLAISGILHQLRVEKVPEKTSLFRISLPADMFSVKEGMMKKRGENSPVVYFQAPENFPLNGFNNRQVVLAYANPTLSAV

SEQ ID NO: 1171 - protein, 368 aa, Human adenovirus
MHPVLRQMRPQSRAPTPSGPIALGGSGEPEEPSTLELEEGEGLARLGAHSPERHPRVQLTRDSRAAFVPRQNMFRDNSGQEAEEMRDCRFRAGRELRCGLNRERLLREEDFEPDERSGISPARAHVSAANLVSAYEQTVTEERNFQKSFNNHVRTLIAREEVAIGLMHLWDFVEAYVHNPASKPLTAQLFLIVQHSRDNETFRDAMLNIAEPQGRWLLDLINILQSIVVQERSLSLADKVAAVNYSMLSLGKFYARKIYKSPYVPIDKEVKIDSFYMRMALKVLTLSDDLGVYRNDRIHKAVSASRRRELSDKELMHSLQRALTGAGTEDESFFDMGADLKWQPSARALEAAGQDNDDDDDDEDQYED

SEQ ID NO: 1172 - protein, 807 aa, Human adenovirus
MESVEKKDSLTAPSEFATTASTDAANAPTTFPVEAPPLEEEEVIIEQDPGFVSEDDEDRSVPTEDKKQDQDNAEANEEQVGRGDERHGDYLDVGDDVLLKHLQRQCAIICDALQERSDVPLAIADVSLAYERHLFSPRVPPKRQENGTCEPNPRLNFYPVFAVPEVLATYHIFFQNCKIPLSCRANRSRADKQLALRQGAVIPDIASLNEVPKIFEGLGRDEKRAANALQQENSENESHSGVLVELEGDNARLAVLKRSIEVTHFAYPALNLPPKVMSTVMSELIVRRAQPLERDANLQEQTEEGLPAVGDEQLARWLQTREPADLEERRKLMMAAVLVTVELECMQRFFADPEMQRKLEETLHYTFRQGYVRQACKISNVELCNLVSYLGILHENRLGQNVLHSTLKGEARRDYVRDCVYLFLCYTWQTAMGVWQQCLEECNLKELQKLLKQNLKDLWTAFNERSVAAHLADIIFPERLLKTLQQGLPDFTSQSMLQNFRNFILERSGILPATCCALPSDFVPIKYRECPPPLWGHCYLLQLANYLAYHSDIMEDVSGDGLLECHCRCNLCTPHRSLVCNSQLLNESQIIGTFELQGPSPDEKSAAPGLKLTPGLWTSAYLRKFVPEDYHAHEIRFYEDQSRPPNAELTACVITQGHILGQLQAINKARQEFLLRKGRGVYLDPQSGEELNPIPPPPQPYQQQPRALASQDGTQKEAAAAAATHGRGGILGQSGRGGFGRGGGGHDGRLGEPRRGSFRGRRGVRRNTVTLGRIPLAGAPEIGNRFQHGYNLRSSGAAGTARSPTQP

SEQ ID NO: 1173 - protein, 149 aa, Orf virus
MACLIEWVDSIFNRRHRNFGPEDMYRPSDPTPPSKSRTPRTPHQHTPRNRCPERPRRHNSSPICGACVDSLPRNRKRFQHRHSCPGDYEQCQLSETISLEATLLTVTTTSISSISSIYSSSSSDSISLGQCRLSMVSATSTSTTFSSSE

SEQ ID NO: 1174 - protein, 98 aa, Human cytomegalovirus
MIHDYHWRRGKRRKLIVMMETRMMIIMMTIKPPHDIYREQQNHHDDETKRSTKHCVTATHPWPRPAASCFRCPLRGGHHRRRPACALPHGWSVMNSCS

SEQ ID NO: 1175 - protein, 121 aa, Cercopithecine herpesvirus
MRSLLFVVGAWVAAAVTYLSPNAALATDTTPTVAAANSTTANSTAATVAGTAAPTTGAPATNSTVVPETPGPFPPVDFALPAVIGGLCALTLAAMGAGALLHRCCRRAAARRRQRAAYVYA

SEQ ID NO: 1176 - protein, 120 aa, Human adenovirus
MPLPCIPPPPVSRDTAACIAWLGLAHASCVDTLRFIKHHDLKITPEAEYILASLREWLYFAFLTERQRCKQKGRGAITSGRTWFCFFKYEDARKSVVYDAARQTVSLQIGTIQQVPTTAL

SEQ ID NO: 1177 - protein, 121 aa, Influenza A virus
MDSNTVSSFQDILLRMSKMQLGSSSEDLNGMITQFESLKLYRDSLGEAVMRMGDLHLLQNRNGKWREQLGQKFEEIRWLIEEVRHRLKTTENSFEQITFMQALQLLFEVEQEIRTFSFQLI

SEQ ID NO: 1178 - protein, 576 aa, Banna virus
MAWVTQAYSSGLSQNSIISLTGNDRTVADGTFNSMIMPRAVIANEREHFMKTRIDKIEHDLSRNAKQEMMDRQSLAEDYSALNLAVGQEIKLDIATQHQLNRLGSSMYKADHEREAELTDLINRIRENEVTVNGILENQKAITAAERADLLLEVVASTAKSVSAAGRAAADGSGVVPVFGPSVANGIKVGIDIADSVAEAAIAVKESGIITQLNDVYHAFQSVHVAPNDIIKPAAVVAGTSTELIGNLQAIYSRLRSHSDIGFKKATVGDVIPHSYMVKPVNSTEYASWQLYVIHPVQGSLGLVVQVMGDALTYNVFAQYGTTSASEFGKTVLTGGATNTALEGTKVKFQTKVTAQQALALTMALKDAASMLSQGELIGYFEQYINLALEPDNLSLQDNMHKYHHLLTSQNSPIDWNYHDEEMHKWLDSRKITNYDTMKQKDGVVIADIHIPKVFNDLRNTTLHCKLEGKQNIAGYTVYEYLIGPWAHYGDIDYSVVVDTLNEETKWYCEIIGIDGHLIIEKSVQHKPEKILELTVNDDGLTSFKGKNHDRLKLKVYVKDSLAVKVFRNWIGINGT

SEQ ID NO: 1179 - protein, 485 aa, Human adenovirus
MASNQHSQRERTPDRNTQPPPPKMGRYFLESESEEDLEAVPLPPKKKARRSMATIPLSPESEKEEETEPPNAVLGVMGFSMPPVRIMHHADGSQSFQKMEERQVRILKAAAQNMEGKEQKGVVIVRNPTSEPLISAWEKGMEAMAMLMEKYHVDHDERASFRFLPDQGAVYKKICTTWLNEEKRGLQLTFSSQKTFQELMGRFLQGYMQAYAGVQQNAWEPTGCCVWEHQCTEREGELRCLHGMEMVRKEHLIEMDVTSESGQRALKENPSKAKVVQNRWGRNVVQIKNDDARCCFNDVGCGNNSFSGKSCGLFYSEGTKAQMAFRQIEAFMLADYPHMRQGQKRFLMPVRCECLNKQDGLPRMGRQLCKITPFNLSNVENIDVNEVSDPGALASIKYPCLLVFQCANPVYRNARGNAGPNCDFKISAPDVMGALQLVRQLWGENFEGPLPRLVIPEFKWHPRLQYRNIALPTNHGDSREEPFDF

SEQ ID NO: 1180 - protein, 492 aa, Human herpesvirus
MGLFGMMKFAQTHHLVKRRGLRAPEGYFTPIAVDLWNVMYTLVVKYQRRYPSYDREAITLHCLCSMLRVFTQKSLFPIFVTDRGVECTEPVVFGAKAILARTTAQCRTDEEASDVDASPPPSPITDSRPSFAFSNMRRRGHAFAPGDRGTRAAGPGPAAPSGAPSKPALRLAHLFCIRVLRALGYAYINSGQLEADDACANLYHTNTVAYVHTTDTDLLLMGCDIVLDISTGYIPTIHCRDLLQYFKMSYPQFLALFVRCHTDLHPNNTYASVEDVLRECHWTAPSRSQARRAARRERANSRSLESMPTLTAAPVGLETRISWTEILAQQIAGEDDYEEDPPLQPPDVAGGPRDGARSSSSEILTPPELVQVPNAQRVAEHRGYVAGRRRHVIHDAPEALDWLPDPMTIAELVEHRYVKYVISLISPKERGPWTLLKRLPIYQDLRDEDLARSIVTRHITAPDIADRFLAQLWAHAPPPAFYKDVLAKFWDE

SEQ ID NO: 1181 - protein, 498 aa, Orf virus
MILARAGGRPRTPAAAAAAAEDGEHSDRRKRKRKTPNCEDADNSDDELAQTPCDREWPDCRASSITSSDSVSLGDEIYLRYVASQVDFAQTWAPPVRLLRFFGNFSKETLNRMSRRGYVNRSYFQMAHARFSPTNDDMYHMATGGYGIVFRFDRYVVKYVFEHRNGMSEMDASTEYMVPRFLRNNLKGDEREFVVCALAMGLNYRLGFLHSLYRRVLHTLLLLMRAEEGQRPSVEMAKKPLLRWFEARKDSESFVRLISYFYPSAVQSNVNLINNFHHLVHFFEHEKRARYVFDRGAVIVFPLARGSADSISPEAAAALGFAPHSEFLKFVFLQIALLYLKIYELPGCTNFLHVDLKPDNVLIFDSTRALSVTAAGATFRFEEPVRAALNDFDFARVATIENRKIAGSVRVPQNWYYDFHFFSHTLLRAYPHIAAEDPGFHALLSELTVSCSRGTCDRFRLRVSSPHPIEHLARLVRRDVFSRWINAAADAPDAAALS

SEQ ID NO: 1182 - protein, 424 aa, Human cytomegalovirus
MVMFSQDHVQIVYGSTRICKSLAPANKRKTHRTIVVAPRRGFLRIPPDGQDVNHVKIVPTTSSSLAPPRDDERRPTPPLRPPLTVYPYGTSLIRRSARDAKLRSKLIVFHITRPALGQHPQNPGISGPAAMDHSEFLTSFRREVDRQTVLTAESAPATAEVCLGDALPGGVMGGGGLPAGVGSASAAVAAAAAAVAGVPVAANPVMPATATVTTPPMIDLTSHHRPLTLFTPASAAAAPAVATNGGNATYILPADCRYAPLFASKYKYVFEEVSRLMRLHDSTAVQLQISASCGNAFQALKSALLKLHNVTVLAGQQLITQTMPHTPQAVATFKFFHQDPNRVLDCIRPVVPRSTSYHETGVYQMWVSGATKKDLFDAVTLCASIVEKQPDVFNINVSLLTYPSIAAPHLPLYNEFTSFRLPTS

SEQ ID NO: 1183 - protein, 444 aa, Molluscum contagiosum virus
MEIVNPGPESPSAELMASIDMREVLARYVEDTDTAEQLLRWATDKAAVYYLRNISNSKANIEETKFETANNIGIEYSKDHKNKLSYRNKPLIPTNLEYEYLCDLIKSTSGGDKETLRYLLFGIKCVRARVEYDIDKLPDYNYDKYFHVLNERSSAPCPVCRGLNTTPMILQTRASDEEPTVRYVCKDCNKHFSPPKFRSPRGGHAEPGPPEGVSRGTQGSHAPAGEGEPEHVARRPRTRAKERACKCEVESEKAETKAVAEAKEETPVSEEAAQCLENAASAENVAHSDDEEFADDPGPVPVPEVLSADDAAAAAAVADALDNANDVTTGNADDEDASEKDADEDAEKDTDGDAEDNDQHEGIAENASVTRDADRNSDKPVTRGSASAQPGAKGRSRAKASTRAHAKRECLDSVQRSRPGVHGAAPLYATEPLLGAAPRSGSKA

SEQ ID NO: 1184 - protein, 567 aa, Vaccinia virus
MDFIRRKYLIYTVENNIDFLKDDTLSKVNNFTLNHVLALKYLVSNFPQHVITKDVLANTNFFVFIHMVRCCKVYEAVLRHAFDAPTLYVKALTKNYLSFSNAIQSYKETVHKLTQDEKFLEVAEYMDELGELIGVNYDLVLNPLFHGGEPIKDMEIIFLKLFKKTDFKVVKKLSVIRLLIWAYLSKKDTGIEFADNDRQDIYTLFQQTGRIVHSNLTETFRDYIFPGDKTSYWVWLNESIANDADIVLNRHAITMYDKILSYIYSEIKQGRVNKNMLKLVYIFEPEKDIRELLLEIIYDIPGDILSIIDAKNDDWKKYFISFYKANFINGNTFISDRTFNEDLFRVVVQIDPEYFDNERIMSLFSTSAADIKRFDELDINNSYISNIIYEVNDITLDTMDDMKKCQIFNEDTSYYVKEYNTYLFLHESDPMVIENGILKKLSSIKSKSKRLNLFSKNILKYYLDGQLARLGLVLDDYKGDLLVKMINHLKSVEDVSAFVRFSTDKNPSILPSLIKTILASYNISIIVLFQRFLRDNLYHVEEFLDKSIHLTKTDKKYILQLIRHGRS

SEQ ID NO: 1185 - protein, 90 aa, Influenza A virus
MEQEQDTPWTQSTEHINIQKKGSGQQTQKLGRPNLTQLMDHYLRIMSQVDMHKQTVSWKQWLSLKNPTQGSLKTRALKRWKSFNKQGWTD

SEQ ID NO: 1186 - protein, 395 aa, Rotavirus
MDVLFSIAKTVSDLKKKVVVGTIYTNVEDVVQQTNELIRTLNGNIFHTGGIGTQPQKEWNFQLPQLGTTLLNLDDNYVQSTRGIIDFLSSFIEAVCDDEIVREASRNGMQPQSPALILLSSSKFKTINFNNSSQSIKNWNAQSRRENPVYEYKNPMLFEYKNSYILQRANPQFGSVMGLRYYTTSNTCQIAAFDSTLAENAPNNTQRFVYNGRLKRPISNVLMKIEAGAPNISNPTILPDPNNQTTWLFNPVQLMNGTFTIEFYNNGQLIDMVRNMGIVTVRTFDSYRITIDMIRPAAMTQYVQRIFPQGGPYHFQATYMLTLSILDATTESVLCDSHSVEYSIVANVRRDSAMPAGTVFQPGFPWEHTLSNYTVAQEDNLERLLLIASVKRMVM

SEQ ID NO: 1187 - protein, 120 aa, Human adenovirus
MPLPCIPQPPICRDTAACIGWLGLAHATCVDTIRFVKEHNLKITPEAEYILLSLREWLYFAFVTERQRRKQKGRGAVTSGRTWFCYSKYEDARKSVVYDAARQTVWLQTGAVQQVPSTTL

SEQ ID NO: 1188 - protein, 64 aa, Human respiratory syncytial virus
MENTSITIEFSSKFWPYFTLIHMITTIISLLIIISIMIAILNKLCEYNVFHNKTFELPRARVNT

SEQ ID NO: 1189 - protein, 151 aa, Orf virus
MDHEKYVLSMFLEEDNSFFSFVAALSDDEALGAVQSAAALLDFLLSVVVRGKEKLAAAGHHYDSIADGRARAAFEFRDLRELAQLFDRRPCGVQDRVRVRDGPARAFVDAALGLMRERGFDGAQAAERARYIAPNDLPALGAISATLSPGL

SEQ ID NO: 1190 - protein, 255 aa, Human herpesvirus
MFSASTTPEQPLGLSGDATPPLPTSVPLDWAAFRRAFLIDDAWRPLLEPELANPLTARLLAEYDRRCQTEEVLPPREDVFSWTRYCTPDDVRVVIIGQDPYHHPGQAHGLAFSVRADVPVPPSLRNVLAAVKNCYPDARMSGRGCLEKWARDGVLLLNTTLTVKRGAAASHSKLGWDRFVGGVVQRLAARRPGLVFMLWGAHAQNAIRPDPRQHYVLKFSHPSPLSKVPFGTCQHFLAANRYLETRDIMPIDWSV

SEQ ID NO: 1191 - protein, 336 aa, Molluscum contagiosum virus
MKKEPAALLRTAHAQRSRWQARAMLLGEGESPSSGDSPVAGQLSRLCSSSGSSSGFISGSGLDSEAGSGVSPGPACSHDCVPGCRCLCPVILCAQVTAPQPELARGAGASDGRPSNESERERDGENERSAGPSSAHSSSGEYERASNEGRSSSCSRASEHESERSSGSGSEYQSALSAFGGSEPERSRGLPPPARGVPSCEPAFQVVLDLLRSAGINAQLYAIEPESSSSETYSDSDSSDSGCGSRDSRSLSRSGGQRYERNLSGGSTPSDMRCVLCNANLLECMCLMDPSAVLQHVSIISSDSSSVVGGCFESSSSTLSEEVRLLRSGCYCCVLM

SEQ ID NO: 1192 - protein, 567 aa, Variola virus
MDFIRRKYLIYTVENNIDFLKDDTLSKVNNFTLNHVLALKYLVSNFPQHVITKDVLANTNFFVFIHMVRCCKVYEAVLRHAFDAPTLYVKALTKNYLSFSNAIQSYKETVHKLTQDEKFLEVAEYMEELGELIGVNYDLVLNPLFHGGEPIKDMEIIFLKLFKKTDFKVVKKLSVIRLLIWAYLSKKDTGIEFADNDRQDIYTLFQHTGRIVHSNLTETFRDYIFPGDKTSYWVWLNESIANDADIVLNRPAITMYDKILSYIYSEIKQGRVNKNMLKLVYIFEPEKDIRELLLEIIYDIPGDILSIIDAKNDDWKKYFISFYKANFINGNTFISDRTFNEDLFRVVVQIDPEYFDNERIMSLFSTSAVEIKRFDELDINNSYISNIIYEVNDITLDTMDDMKKCQIFNEDTSYYVKEYNTYLFLNETDPMVIENGILKKLSSIKSKSRRLNLFSKNILKYYLDGQLARLGLVLDDYKGDLLVKMINHLKFVEDVSAFVRFSTDKNPSVLPSLINTILASYNISIIVLFQKFLRDNLYHVEKFLDKSIHLTKTDKKYILQLIRHGRS

SEQ ID NO: 1193 - protein, 40 aa, Influenza A virus
YKDWILWISFAISCFLLCVVLLGFIMWACQKGNIRCNICI

SEQ ID NO: 1194 - protein, 393 aa, Human herpesvirus
MCWSFHLFFKAHKARVGARTSFLTEMERGSRDHHRDHRDHREHRETREPPTLAFHMKSWKTINKSLKAFAKLLKENTTVTFTPQPSIIIQSAKNHLVQKLTIQAECLFLSDTDRFLTKTINNHIPLFESFMNIISNPEVTKMYIQHDSDLYTRVLVTASDTCTQASVPCVHGQEVVRDTGRSPLRIDLDHSTVSDVLKWLSPVTKTKRSGKSDALMAHIIVQVNPPTIKFVTEMNELEFSNSNKVIFYDVKNMRFNLSAKNLQQALSMCAVIKTSCSLRTVAAKDCKLILTSKSTLLTVEAFLTQEQLKEESRFERMGKQDDGKGDRSHKNDDGSALASKQEMQYKITNYMVPAKNGTAGSSLFNEKEDSESDDSMHFDYSSNPNPKRQRCVV

SEQ ID NO: 1195 - protein, 150 aa, Torque teno virus
MFIGRHYRKKRALSLCAVRTTKKACKLLILMWTPPRNDQQYLNWQWYSSILSSHAAMCGCPDAVAHFNHLASVLRAPQNPPPPGPQRNLPLRRLPALPAAPEAPGDRAPWPMAGGAEGEDGGAGGDADHGGAAGGPEDADLLDAVAAAET

SEQ ID NO: 1196 - protein, 782 aa, Human adenovirus
MMDLEPQESLTAPTAPAIGATAVMEKDKSLLIPQDAPVEQNLGYETPPEEFEGFLQIQKQPNEQNAGLEDHDYLNEGDVLFKHLQRQSTIVRDAISDRSSIPVSIAELSCIYERNLFSPRVPPKRQANGTCEPNPRLNFYPVFAVPEALATYHIFFKNHKIPLSCRANRSRADELLALRAGASIPGIVSLEEVPKIFEGLGRDEKRAANALQKENEQNHHGNSALIELEGDNARLAVLKRNIEVTHFAYPAVNLPPKVMSAVMNQLLIKRAQPIDKDANLQDPEATDDGKPVVSDEQLTKWLGTDNSNELQQRRKLMMAAVLVTVELECMHRFFSDITTLRKIEECLHYTFRHGYVRQACKISNVELSNLVSYMGILHENRLGQNVLHSTLRDEARRDYVRDCIYLFLLHTWQTGMGVWQQCLEEKNLRELNKLLDRALKSLWTGFDERTVAAELADIIFPERLMITLQNGLPDFMSQSMLHNYRSFILERSGMLPSMCCALPSDFVPIYFRECPPPLWSHCYLLRLANYLAYHSDLMTDSSGEGLMECHCRCNLCTPHRSLVCNTELLSESQVIGTFEMQGPQSDSNFTTNLRLTPGLWTSAYLRKFEPQDYHAHSINFYEDQSKPPKAPLTACVITQGKILAQLHAIKQAREEFLLKKGHGVYLDPQTGEELNLPSPLCATASPHSQHVPESRKTGYCAATLKETAATAGNLGGRILGESGRGRGRGLGRMGGGGGGQPRRGSRGGGGRFQGRSDRRQTVAFNQALSNETRCEQISESQP

SEQ ID NO: 1197 - protein, 193 aa, Orf virus
MDEHRLRDLAAKHTDAAEAARIARWALDCAQRFALKNIVNTKTSNTDETNFEPAHNIGIEYSKDAKNRLSYKNKRSLEVDANEDYADLRAQIRATSGTEHDALRYLLFAVKCVAARVPYDIEEVPDHDYSGYFNVLDEKFNLPCPSCQSKNTMPMMIQTRSADEPPLIKYACKNCQKSFNPPKFCEKKGKQKS

SEQ ID NO: 1198 - protein, 218 aa, Variola virus
MNSVTVSHAPYTITYHDDWEPVMNQLVEFYNEVASWLLRDETSPIPDKFFIQLKQPLRNKRVCVCGIDPYPKDGTGVPFESPNFTKKSIKEIASSISRLTGVIDYKGYNLNIIDGVIPWNYYLSCKLGETKSHAIYWDKISKLLLHHITKHVRFLYCLGKTDFSNIRAKLESPVTTIVGYHPAARDRQFEKDRSFEIINVLLELDNKAPINWAQGFIY

SEQ ID NO: 1199 - protein, 114 aa, Cercopithecine herpesvirus
MADADPRFHLPDTLHPERIQALGLREIVLAVNEARPIDHTHDHPLGNRAAARNFIRGQAGALADLCRAHANHTLELQPMFSREAPGAWLRPAFGLRRTYMPFLAAPNNQPAGTP

SEQ ID NO: 1200 - protein, 91 aa, Human adenovirus
MIPRVFILLTLVALFCACSTLAAVSHIEVDCIPAFTVYLLYGFVTLTLICSLITVVIAFIQCIDWVCVRFAYLRHHPQYRDRTIAELLRIL

SEQ ID NO: 1201 - protein, 1091 aa, Human adenovirus
MQCVDTATNSPVEIKYHLHLKHALTRLYEVNLRTLPPDLDLRDTMDSSQLRALVFALRPRRAEIWTWLPRGLVSLSVLEEPQGESHAGEHENHQPGPPLLKFLLKGRAVYLVDEVQPVQRCEYCGRFYKHQHECSVRRRDFYFHHINSHSSNWWQEIQFFPIGSHPRTERLFVTYDVETYTWMGSFGKQLVPFMLVMKFSGDPELVALARDLAARLRWDRWERDPLTFYCVTPEKMAVGQQFRLFRDELQTLMARELWASFMQANPHLQEWALEQHGLQCPEDLTYEELKKLPHIKGRPRFMELYIVGHNINGFDEIVLAAQVINNRASVPGPFRITRNFMPRAGKILFNDVTFALPNPLSKKRTDFELWEHGGCDDSDFKYQFLKVMVRDTFALTHTSLRKAAQAYALPVEKGCCPYKAVNHFYMLGSYRADDRGFPLREYWKDDEEYALNRELWEKKGEAGYDIIRETLDYCAMDVLVTAEFVAKLQDSYAHFIRDSVRLPHAHFNIFQRPTISSNSHAIFRQIVFRAEQPQRTNFGPGLLGPSHELYEYVRASIRGGRCYPTNIGIFSEPIYVYDICGMYASALTHPMPWGPPLNPYERAMAAREWQMALDDASSKIDYFDKKLCPGIFTIDADPPDEHLLDVLPPFCSRKGGRLCWTNEPLRGEVATSVDLVTLHNRGWRVRIVPDERTTVFPEWKCVAREYVQLNIAAKERADRDKNQTMRSIAKLLSNALYGSFATKLDNKKIVFSDQMDESLLKSIAAGQANIKSSSFLETDNLSAEVMPALEREYLPQQLALVDSDAEESEDEHRPAPFYTPPSGTPGHVAYTYKPITFLDAEEGDMCLHTVEKVDPLVDNDRYPSHVASFVLAWTRAFVSEWSEFLYEEDRGTPLQDRPIKSVYGDTDSLFVTERGHRLMETRGKKRIKKNGGKLVFDPEQPELTWLVECETVCAHCGADAFAPESVFLAPKLYALQSLLCPACGRSSKGKLRAKGHAAEALNYELMVNCYLADAQGEDRARFSTSRMSLKRTLASAQPGAHPFTVTETTLTRTLRPWKDMTLAALDAHRLVPYSRSRPNPRNEEVCWIEMP

SEQ ID NO: 1202 - protein, 364 aa, Human herpesvirus
MDRSNREHHSHRDHREHRDSKEPPTMAFHMKTWKTINKPLRAFAKLLRENTTVTFTPQPAIIIQSAKNHLVLKLIIHAECLYITDTDHFSTKTINNFVPLFDSFMGIISNPDVTKLYIQHDSDLYTRFLVTASDICAQASIPCVNGQEIVRESGKSALRIDLDHSTVTEILKWLAPVTKNKRSNKNEMTLAQIVVQVNPPSIKFLTDLNEIEFAHSGKVVFHDAKCMRLVLSSKNLQQAFSTCAVLKSSCSLRAIAGKEYKLFLIAKNVFLTVEAYLSQEQVKDDPKFERQAKTEEKGEKNHKVEEGNNFFCKQETQHKITSYMVPTKNGGTGTNFFNEKEDSESDDSAHFDYTPNSKRQRCGM

SEQ ID NO: 1203 - protein, 116 aa, Human adenovirus
MKYCLRMAVEGALTELFNIHGLNLQNQCVQIIQQWKNENYLGMVQSGSLMIEEFHDNAFALLLFVEIRAVALLDAVVEHLENRLQFDLAVIFHQHSGGDRCHLRDLRIQILADRLD

SEQ ID NO: 1204 - protein, 57 aa, Human adenovirus
MPAIQPPLYPTFLLLILLSLIITLYVWIISTITYKTAVRHAALHQRSFSRWSLDHSL

SEQ ID NO: 1205 - protein, 806 aa, Orf virus
MLTRTTDSTMSYPTSDRAAALVRCMIASGLDIWAIEREDLTLAALMGFTGTINSNFSQRHDYNFYRLASELSKFSSSCILIVTPDLTAPDLVCTMLQNTTEVVPAMLPHLCRHAYCVSNMLDIDCLFRLCSYNMYALRDFTMSRRGFEFVEHALRRISVHSPLCDLSRIPQAVTLCRTDEHLRQFFQNASVTEARAALSCREIGYEILLEVHDQHGIAPMNTGFRAVRNHRLVVETIPNFMEETAVDFTQFLSPSVLQHREVLDAVLDELRPHVACRSLYAYLTKMFKADYIVNRAGVIAYACFSEYAQELFDACHIYVSLPLSAFELDIIFEHAEVYVDTLDMRAAMYNVLETLRVTDVSAYTNLWRVQPAGCMAVAMYVSPINDVLQQGMRLGLSIDATENLIELQSAFAENISEETIRMIVERNAVDMEWFTASNVDMVLPFIDEVLSVEDVLLPASSNPADSIFSREEVLSAYALKFRNHPMFFGAVTGSLLPAETKLAIFQRATEGGVFPIPLLDTHLFAFAYNWSPRLLYNYQPTIHPQVERVDSTQLLEDVVLRMEGKTRILIGSRARKYMFVTDMMARDGGLRSDGCTEHKLVLVESDGCMAVGLRYTQRKLAFASLTHRLREVGSDLMRLIQRGIVYRLVTWGAPSQIDILESGFVRAVYSVQFSALDWGNYATLDDDLIASGMAFARCNQPLVRARAVAHYLYTYVAYFVLMWFYNYREESLEEVLEALDQTLGHGLACRHFDLRTAARQLSVVVTENALVAVRGNHRFTEADLFVDAIVAGGLEKLCEEAQNMQK

SEQ ID NO: 1206 - protein, 481 aa, Human herpesvirus
MACRKFCRVYGGQGRRKEEAVPPETKPSRVFPHGPFYTPAEDACLDSPPPETPKPSHTTPPSEAERLCHLQEILAQMYGNQDYPIEDDPSADAADDVDEDAPDDVAYPEEYAEELFLPGDATGPLIGANDHIPPPCGASPPGIRRRSRDEIGATGFTAEELDAMDREAARAISRGGKPPSTMAKLVTGMGFTIHGALTPGSEGCVFDSSHPDYPQRVIVKAGWYTSTSHEARLLRRLDHPAILPLLDLHVVSGVTCLVLPKYQADLYTYLSRRLNPLGRPQIAAVSRQLLSAVDYIHRQGIIHRDIKTENIFINTPEDICLGDFGAACFVQGSRSSPFPYGIAGTIDTNAPEVLAGDPYTTTVDIWSAGLVIFETAVHNASLFSAPRGPKRGPCDSQITRIIRQAQVHVDEFSPHPESRLTSRYRSRAAGNNRPPYTRPAWTRYYKMDIDVEYLVCKALTFDGALRPSAAELLCLPLFQQK

SEQ ID NO: 1207 - protein, 226 aa, Cercopithecine herpesvirus
MALGSPRARLGDWMVLAYEGSRHCGRSVSEDAPPPYSPPPAAEAVFVSIDIGESLEAPPPYSPPVPRGEAGPPPGAAARARRAQRRAARRSRRRAGRRAARGGDYALRSPPSSVGAASPPALPSYSEALRDLPPPYDTVISVDAHDGLESRTEASLVHHPQRHERPSPSRLSRPPRVSSRELYRCRRAALVRESSRRACCSTLTHAHVILGVLLLVLVFLWLFLWH

SEQ ID NO: 1208 - protein, 128 aa, Human adenovirus
MAAAVEALYVVLEREGAILPRQEGFSGVYVFFSPINFVIPPMGAVMLSLRLRVCIPPGYFGRFLALTDVNQPDVFTESYIMTPDMTEELSVVLFNHGDQFFYGHAGMAVVRLMLIRVVFPVVRQASNV

SEQ ID NO: 1209 - protein, 2194 aa, Pichinde mammarenavirus
  misc_feature (1808)..(1808): Xaa can be any naturally occurring amino acid
MEEYVFELKDIVRKWVPEWEELSEQKNNVLAQVKDRAITIEGLKLLSMLVEVDSCKKHSCKHNTKMTVNAILRELRVTCPTLPDVTPDGYCMVGDVLILLEVFVRTSQEAFEKKYNQDFLKLLQLSSDLKRQNITLVPVIDGRSSYYVEFVPDWVVERLRWLLLKLMDGLRTSGEEVEELEYERLISSLSSLENQSLGLESLLAVKERGLPYKVRLEKALMSGINNKLTTDQCRTKIMEIFQQFKMLQLAGQLDRKLQATDREDMISRLQNHEFIQCSVKDVPKSEIRLCEFCSVHILGIIGQLRQSEVKHSSTESREYFRVLSICNKIKSQKVFNTRRNTMLVLDLIMYNILCDLDKSSPGAVFREVLLMQGLPSVNDRLINVDFLMEQITKKFIKNPNWLEKAKKRLSSVCGELPLDDILPLLREPDVEYYFNLKTSVLDEWGAKPCLQYKTKSQCMCGGRPGRGQPDYTIMGESEFEELLKTLSSLSLSLINSMKTAAVPKMKVNNADEFYGKVYCDEVFFQRFGEGGSLTLLYQKTGERSRCYAVAYRSKSGGLYETKASFYCDPKRFFLPIFSADVIQRTCVEMLSWLDFMSQPLLDSVSDLLRRLILCILCTPSKRIQVYLQGFRYYIMAFVNEVHFKELFEKLKVVMLTPSEWQTAMLIDDLILLVLSNSREEDMAKIFKFVLNVSYLCHFITKETPDRLTDQIKCFEKFLEPKLKFDSVLVNPSNSMELPTEEEEKMVHDIERLLGKKLESKCEGRPGLNKDVLSVCLSLFNSSSLEVKPLLPCDPMTPSFTSTALDMSSNKSVVVPKLNEVGEVITEYDYSSIVSAVVVEMIEHFKTKGKYKLDPKEVNFKILKRLSSLIQIKKESIEPDGVEELLSEDQGDCLKEIETRVAKVLSKVDTNVKTNLKTSCPLERLWPKSTMVVIKRETSLHDVKDFDYSLFSAEVYEDLVNLIYEDVTARSVYFADRLMNPCPLEFLIKNLTLKAYKEADYFECFKYILIASDYDNRVGRYDHKSRSRLGFTDAALQIRETSRISSRESNSESIAKRLDQSFFTNSSLRNLCFYSDESPTERSGVSTNVGRLKFGLSYKEQVGGNRELYVGDLNTKLTTRLIEDYSESLMQNMRYTCLNNEKEFERALLDMKSVVRQSGLAVSMDHSKWGPHMSPVIFAALLKGLEFKLKDGSEVPNAAVINILLWHIHKMVEVPFNVVEAYMKGFLKRGLGMMDKGGCTIAEEFMFGYFEKGKVPSHISSVLDMGQGILHNTSDLYGLITEQFINYALELCYGARFISYTSSDDEIMLSLNEGFKFKDRDELNVELVLDCMEFHYFLSDKLNKFVSPKTVVGTFASEFKSRFFIWSQEVPLLTKFVAAALHNIKAKAPNQQADTIDTILDQCVANGVSIEVVGAIAKRTNSMIIYSGFPNDPFLCLEEMDVLDWVNGSRGYRLQRSIETLFPDDLLLSIIRKACRKIFYKIQSGALEESYIVTTLQQSPDDCLKQLLETCDVETEAIEDALNIRWLNLRVHGDLRLVLRTKLMSTTRTVQREEIPSLVKSVQSKLSKNYVRGAKKILADAINKSAFQSSIASGFIGVCKSMGSKCVRDGKGGFKYIRDITSKIILHRDCHFCNQRKGVYCKAALGEVSEYSRPLIWDYFALVLTNACELGNWVFQKAEVPKIVTHLNNPNHFWPIKPSTHSELEDKVGINHILYSIRRNFPTLFDEHISPFLSDLNMLRLSWVQRIKFLDLCVAIDITSECLGIVSHIIKHRREELYIVKQNELAMSHSRESHPLERGFNLEPEEVCXNFLIQILFESMLVPVIMSTSQFKKYFWFGELELLPNNAQHDLKQLTQFICDCKKNNTSRTMNLDDLDVGFVSSKLILSCVNLNISVFINELDWVNRDNYENIEQLILASPSEVIPIELNLTFSHKRVSHKFRYERSTNYILKLRFLIERESLLDSLDSDGYLLLNPHSVEYYVSQSSGNHISLDGVSLLVLNPLINGKDVLDFNDLLEGQDIHFKSRSTVFQKVRIDLKNRFKDLKNKFSYKLIGPDVGMQPLILEGGLIKEGNRVVSRLEVNLDSKVVIIALEALEPEKRPRFIANLFQYLSSAQSHNKGISMNEQDLRLMIENFPEVFEHMLHDAKDWLNCGHFSIIRSKTLGSVMIADETGPFKIKGIRCRKLFEDNESVEIE

SEQ ID NO: 1210 - protein, 302 aa, Banna virus
MANRATSAFLDNPHPVGVNYVDEGSRQFVAVAELLASKLIASSRESDESNSDVPFVQAYSKFADDNPRHLRVKTGGKMANALTNVIRSYYSINAPAIVPQVEIDRLASKATVSGDMYNSYAVFNSVPIVEVLSPAQTTVSIVGSDRADVTMLNTGAGAANITFNFGQIAETVILKGSVPFQLARANQPMPAARFTYKLRPLDGPFIVVLPVGNPLVISATAATRIQVPLAFNKALVESGFQTAMNDGLFDAQNVNYYSSFDEFIIAQYHALDGINRVSTCVVLGLALQAYDQMRRALPVRRV

SEQ ID NO: 1211 - protein, 109 aa, Human adenovirus
MKAALAIFMLTPMLATSCKLHVPWTFLDCYTKETDYIGWVYGIMSALVFVSSVVSLKLYTLINFSWNQYTDDLPEYPHHQDDLPLNIVLPQPPRPPSVVSYFKFAGEDD

SEQ ID NO: 1212 - protein, 125 aa, Vaccinia virus
MAVCIIDHDNIRGVIYFEPVHGKDKVLGSVIGLKSGTYSLIIHRYGDISQGCDSIGSPEIFIGNIFVNRYGVAYVYLDTDVNIFTIIGKALSISKNDQRLACEVIGISYINEKIIHFLTINENGV

SEQ ID NO: 1213 - protein, 344 aa, Orf virus
MPLFRKLMVSRALVKECLTLDFRQGERLPTRCFLPVPAGTTFHRVCDTSPLTNEVSRHVQEPVMGTGRVQYYYFESGQGMIGDNAGTPRMLVCTRSAYNGGDVVVRSTRSRADKTVVAPCQGMVLLLSPFCAFDITPVESGSAIFAEVTVGAPSMDHVEAVAGDGDAAVRIFNSHHPLWPRHGSNVCFALRLLRDARTGERVVEQMFIDGRWHTVLRTSCGNKVCVPADLVGQTNLEEVPFCDVTPDIMRRALAIDPPYEAVAHPRRCVYGAMDVRCANEYLVYCTFKTEPARRSTSSPGPDGPLSPATPSASQPAAARAPTTPQEVTSPTTKLVETCLRDALD

SEQ ID NO: 1214 - protein, 576 aa, Human cytomegalovirus
MSLLTKAAAEAWGTYLRQRDERCEDAIRCDYGVFQFRNTVFQKTLSMLQGLYLRQYDPPALRTYVQRHQGTTVALRNPANWFLVMREQAAIPQIYARSLAADYLCCDDTLEAVGVLAVRPPDSDLTRNTKQAQELPCVLMLSHYGTVYVYDWETDGLYEVASDIKAFSKNGLLWCEYVYRHPQTPFATTEPRYHVQKFLCTDPTDAAAVAKTAREMSGLNLVIRTPGRTEVEPLLMLGSIEGLRACRPFDHMPAADFRDLLNFIRQRLCCEWYVVGLVGYYLAYGPFVPSGLVLLDKFGVVYLHKIEDSDLYRIADNFHMFLKCGLLKLRGLCRFDRGLRGECRLEELPVCHHTLKRDVLRWHGALGTITRSQLESALDWFLRPTRGTDKVPNNSSAWGRTDLLPTGALQDNQNWAFPSHSVETLPALQGGLWEDNDETTQTVDGQRCFRMPKFFPPPMCRVPYNECGVELPGGDSSDEDESGRPRRIANRIGDTPETPCNSENEDDTTVEGTSGGPEAMDSQAPYPSEDSPTTEKEAWLQRGRRAKAMHARGHTLKQVPIPEPDQMGDDGPDPGP

SEQ ID NO: 1215 - protein, 370 aa, Cercopithecine herpesvirus
MASHAGHQDAPALDRVAGPAGHDNRPSALLRIYVDGPHGLGKTTTAAALAAALGRRDEIEYVPEPMAYWQTLGGPQTITRIFDAQHRLDRGEISAGEAAVAMASAQVTMSTPYAVTESAVAPHIGAELPPGHGPHPNIDLTLVFDRHPVAPLLCYPAARYLMGSLSLPTVLSFAALLPQTTPGTNLVLGALPEAVHAERLAQRQRPGERLDLAMLSAIRRVYDMLGNAIVYLQQGGSWRADWRRLSPARPAAASGRPARILPRPEIEDTIFALFCAPELLDGTGEPYRVFAWTLDLLAERLRPMHLLVLDYNQAPHHCWMDLMEMIPEMTPTLPATPGSMLTLQLLAREFAREMTSARGGDAGGEGSETQ

SEQ ID NO: 1216 - protein, 404 aa, Epstein-Barr virus
METTQTLRFKTKALAVLSKCYDHAQTHLKGGVLQVNLLSVNYGGPRLAAVANAGTAGLISFEVSPDAVAEWQNHQSPEEAPAAVSFRNLAYGRTCVLGKELFGSAVEQASLQFYKRPQGGSRPEFVKLTMEYDDKVSKSHHTCALMPYMPPASDRLRNEQMIGQVLLMPKTASSLQKWARQQGSGGVKVTLNPDLYVTTYTSGEACLTLDYKPLSVGPYEAFTGPVAKAQDVGAVEAHVVCSVAADSLAAALSLCRIPAVSVPILRFYRSGIIAVVAGLLTSAGDLPLDLSVILFNHASEEAAASTASEPEDKSPRVQPLGTGLQQRPRHTVSPSPSPPPPPRTPTWESPARPETPSPAIPSHSSNTALERPLAVQLARKRTSSEARQKQKHPKKVKQAFNPLI

SEQ ID NO: 1217 - protein, 133 aa, Human papillomavirus
NMEKLDYGQLDLKTKLFLPLLLAPREIQIPLLKAGSGSRPPAARRALEGDRASQKTPTPSRPPPRHPDYESDDDENRENLEPPTPHPEDEEQRGNWGPTLHQLLRKWDQDLQRLQDTVTHDLDDYRKKLGIRH

SEQ ID NO: 1218 - protein, 96 aa, Human immunodeficiency virus
MEQAPADQGPQREPYNEWALELLEELKSEAVRHFPRIWLHSLGQHIYETYGDTWVGVEAIIRILQQLLFIHFRIGCQHSRIGIIRQRRARNGSSRS

SEQ ID NO: 1219 - protein, 250 aa, Human adenovirus
MLSILVFVFLPFLLHAQTSEKPLKVFVEVGHNVTLPHLMPDSHETGHVTWLVETADYGVASPNNFIFSGQKLCQFTSRTMVWPYANLDFNCANYDLHLFRLKVENSAIYNVKNTINASEMNIYYQLTVIDILPPKCIITSKYLTNNYCHITINCTNSVYPNKVQFNNVTRFYYGYAKGGPNLPNYFTTNFNVSGITKSFNHSYPFNELCDDPVFQPQNNLKNTVIFLVIIAFSVLIIIAALTYLCCHKQT

SEQ ID NO: 1220 - protein, 116 aa, Vaccinia virus
MKGENVFISPASISSVLTILYYGANGSTAEQLSKYVETEENTDKVSAQNISFKSINKVYGRYSAVFKDFFLGKIGDKFQTVDFTDCRTIDAINKCVDIFTEGKINPLLDEPLSPSN

SEQ ID NO: 1221 - protein, 149 aa, Orf virus
MKLTATIQVVVALLICMYNLPKCVSQDNDSPPSTNDWVRTLDKSGCRPRDTVVYLGDEYPENTNLQYNPRCVTVKRCSGCCNGEGQICTAVETRNTTVVVSVTSVSSSSGANSGVSNNLQRISLTEHTKCDCIGRTTTPPPTTTREPRR

SEQ ID NO: 1222 - protein, 182 aa, Human cytomegalovirus
MDLLIRLGFLLMCALPTPGERSSRDPKTLLSLSPRQACVPRTKSHRPVCYNDTGDCTDADDSWKQLGEDFAHQCLQAAKKRPKTHKSRPNDRNLEGRLTCQRVRRLLPCDLDIHPSHRLLTLMNNCVCDGAVWNAFRLIERHGFFAVTLYLCCGITLLVVILALLCSITYESTGRGIRRCGS

SEQ ID NO: 1223 - protein, 128 aa, Molluscum contagiosum virus
MSCAAAILKSIGGLALFQVANGAIEMLKHCLMYFYEQRLRANSFAFVVIKIGLSMLLYLVLGLALLYVSSRTDMARAETPGTAAGAAVGAAAGAAVSSAASAATSAAVAAVADAVTGAADESVVCAHG

SEQ ID NO: 1224 - protein, 191 aa, Epstein-Barr virus
MAYSTREILLALCIRDSRVHGNGTLHPVLELAARETPLRLSPEDTVVLRYHVLLEEIIERNSETFTETWNRFITHTEHVDLDFNSVFLEIFHRGDPSLGRALAWMAWCMHACRTLCCNQSTPYYVVDLSVRGMLEASEGLDGWIHQQGGWSTLIEDNIPGSRRFSWTLFLAGLTLSLLVICSYLFISRGRH

SEQ ID NO: 1225 - protein, 249 aa, Rotavirus B
MASLPLLVLAAAVNAQLNIVPSVHPEVCVLYADDHQSDANKFNGNFTQIFHSYNSITLSFMSYSSSSYDVIDIMSRYDLSSCSILAIDVFDASMDFNVFLQSTNNCSKYNANKIHYIKLPRGEEWFSYSKNLKFCPLSDSLIGMYCDTQLSDTYFEISTGGTYEVTDVPEFTQMGYTFHSSEDFYLCHRISSEAWLNYHLFYRDYDVSGVISKQINWGNVWSGFKTFAQVLYKILDLFFNSKRNVEPRA

SEQ ID NO: 1226 - protein, 96 aa, Human immunodeficiency virus
MEQAPEDQGPQREPHNEWTLELLEELKNEAVRHFPRIWLHGLGQHIYETYGDTWAGVEAIIRILQQLLFIHFRIGCRHSRIGVTRQRRARNGASRS

SEQ ID NO: 1227 - protein, 156 aa, Human adenovirus
MELEAVLQSFQSVRQLLQYTSKNTSGFWRYLFGSTLSKVVHRVKEDYREEFENILADCPGLLASLDLCHHSVFQERVVRSLDFSSSGRTVASIAFLATVLDKWSERSHLSWDYMLDYMAMHLWRAWLKRRVCIYSLARPLTMPPLQEEQQNTTTEE

SEQ ID NO: 1228 - protein, 373 aa, Variola virus
MIVLLILSLACTAFTYRLQGFTNAGIVAYKNIQDGNEDDNIVFSPFGYSFSMFMSLLPASGNTKVELLKTMDLRKIDLGPAFTELISGLAKPKTSKYTYTDLTYQSFVDNTVCIKPSYYQQYHRFGLYRLNFRRDAVNKINSIVERRSGMSNVVDSTMLDNNTLWAIINTIYFKGTWQYPFDITKTHNTSFTNKYGTKTVPMMSVVTKLQGNTITIDDEEYDMVRLQYKDANISMYLAIGDNMTHFTDSIMAAKLDYWSSQLGNKVYNLKLPRFSIENKRDIKSIAEMMAPSMFNPDNASFKHMTRDPLYIYKMFQNAKIDVNEQGTVAEASTIMVATVRSSPEELEFNTPFVFIIRHDITGFILFMGKVESP

SEQ ID NO: 1229 - protein, 488 aa, Orf virus
MFGGVQVDDKLYAYLKKLAGRGRPLCLFRDNGEFVEVFAGSAFRFVLPVGLFADLRVRTRGVAFPKLRDSARMRGVRVDAHTLPSLYPNQRIVVDEVLAARDQLLAAGRAVYVTLHLACGFGKTLTACHLIATHGRRAVVCVPNRMLVPQWRAAVAELRVPFAVSCDGAASLLRSGELDRAMVAIVVSRHFANDDFCRAVSRQFDVLVLDESHTYNLMNNTAVSRFLTKYPPPMCFFLTATPRTANRIYCNRVVNVSVVSRLTKVVRVVDAFFEPYTTPKIRTLERSLEGPQNKYHVFTEKILGEDVHRNKLIVDTVVAAMAAGEARRVLVLTKLREHMVGLHAALRERLGAETVFLGDAKNRKTPEVTRALRDKDRFVLVSTVFFSGTGLDLPNLDALAVAAAVLNRMVMEQMIGRVCRESHANTRTLFVFPDSSVRAIRDTVSAFAQRLVALAVDGLGFVRERSAAGAKNEPALYSAISGRDLAAV

SEQ ID NO: 1230 - protein, 364 aa, Human cytomegalovirus
MTTSTTTTTNIMLQVSNVTNHTLNSTEIYQLFEYTRFGVWLMCIVGTFLNMLVITTILYYRRKKKSPSDTYICNLAVADLLIVVGLPFFLEYAKHHPKLSREVVCSGLNACFYICLFAGVCFLINLSMDRYCVIVWGVELNRVRNNKRATCWVVIFWILAALMGMPHYLMYSHTNNECVGEFANETSGWFPVFLNTKVNICGYLAPIVLMAYTYNRMVRFIINYVGKWHMQTLHVLLVVVVSFASFWFPFNLALFLESIRLLSGTQNETLQTVITFCLYVGQFLAYVRACLNPGIYILVGTQMRKDMWTTLRVFACCCVKQEIPYQDIDIELQKDIQRRAKHTKRTHYDRKHAPMESGEEEFLL

SEQ ID NO: 1231 - protein, 289 aa, Cercopithecine herpesvirus
MASRRLPKPKPHGTDEVEADVYYDFITPDASPARVSFEEPGARARAPRSQARGRSQAGRYGHHYQDTARVEYPYPAGSSSEDERPADPRPSRRAHAQPEAPGQSAPRGARGAAAARGRVRAESPSPRRDPDPKGASVPRARKSACATATATATTTAAAAGAAKSQTAAAAKKLHFSTAPTSPTAPWTPRVAGFNKRTFCAAVGRVAATHARMAAAQLWDLSHPRNDEELNDLLGATNIRIIVCEGLNLVPRANELISPEVAQDADVGVRGRATTARPAGRSASRRRPPE

SEQ ID NO: 1232 - protein, 444 aa, Human herpesvirus
MRWKRMERRPPLTPLRRSRTQSSGGGLTICPRCALKLPKATRISERPWASTWQLNQHIQVSKTKKATAYLKAPREWGQCTHQDPDWSKRLGRGAFGIIVPISEDLCVKQFDSRREFFYEAIANDLMQATRERYPMHSGGSRLLGFVQPCIPCRSIVYPRMKCNLLQLDWSQVNLSVMAAEFTGLMAAVSFLNRYCGMVHCDVSPDNILATGDLTPMNPGRLVLTDFGSVALHSGSKWTNLVVTSNLGFKQHCYDFRVPPKLICKHLYKPSCVLFQCYLSSLGKMHAQVLDQPYPISPNMGLTIDMSSLGYTLLTCLELYLDLPLNNPLKFLGSATRDGRPEPMYYLGFMIPRVVMTQILSAVWTMTLDLGLDCTGKAQAIPMRQEHQLAFQKQCYLYKANQKAESLANCSDKLNCPMLKSLVRKLLERDFFNHGGHPHTRGLVF

SEQ ID NO: 1233 - protein, 503 aa, Human immunodeficiency virus
MGARASVLSGGKLDRWEKIRLRPGGKKKYRLKHLVWASRELERFAVNPGLLETAEGCRQILGQLQPSLQTGSEELKSLFNAIATLYCVHQGIEIRDTKEALDKIEEEQNKSKKKAQAQQATAGAGNSSQVSQNYPIVQNLQGQMVHQALSPRTLNAWVKVIEEKAFSPEVIPMFTALSEGATPQDLNTMLNTVGGHQAAMQMLKETINEEAAEWDRLHPVHAGPVAPGQMREPRGSDIAGTTSTLQEQIGWMTSNPAIPVGEIYKRWIIMGLNKIVKMYCPISILDIRQGPKEPFRDYVDRFYKTLRAEQASQEVKNWMTETLLVQNANPDCKTILKALGPGATLEEMMTACQGVGGPSHKARVLAEAMSQVTNPATNIMMQKGNFRNQRKTVKCFNCGKEGHIAKNCRAPRKRGCWKCGREGHQMKDCTERQANFLGKIWPSHKGRPGNFPQSRLEPTAPPEESFRFGEETTTPSQKQEPIDKELYPSASLKSLFGNDPSSQ

SEQ ID NO: 1234 - protein, 96 aa, Human immunodeficiency virus
MEQAPEDQGPQREPYNEWTLELLEELKSEAVRHFPRLWLHSLGQHIYETYGDTWAGVEAIIRILQQLLFIHFRIGCQHSRIGITRQRRARNGASRS

SEQ ID NO: 1235 - protein, 599 aa, Human papillomavirus
MAELKGTDNNSNVEIINELFDNEAVCDDDSFQELFDESTDESTISNLIDDSENVVQGNSHALLNAQLSEEYDKDLVTVKRKFYATPEKLASDLSPRLSAVHITPERQSKRRLFRDSGIEDEAENSIVQVQDDSSNVAGNKNGADAELYSLLHSNNRRAALLCKFKEKYGIPFNEITRTFKSNKSCTQNWIIVVFACAEDLIEASKTTMQNHVSYLQMITSDFSALYIICFKAAKSRETVVKLINSLLNTKEEQVLCDPPKIKSMAAALYCYKKVIADTCYKYGDFPDWIATHTVINHQLATADSFKFSDMVQWAYDNDMLDEAAIAYNYACYASENENAAAFLQTNSQLKYVKECCAMVRLYKKQEMRNMTMPEWIKSCFTNNYNSDDWKVIVRYLKYQNINFLEFLLALKLLLKGIPKKMCLVIYGPPDTGKSYFCYQFIQFMRGKVVSFMNKNSHFWLMPLLDSKIGFLDDATQCCWMYLDTHMRNAFDGNAVSVDVKHKNLQQIVLPPMLITTNCDVCRDPTFMYLRSRLTCFNFPNKLPLYENGEPKFKFTDNCWTSFFSKFWKHLDLPEDDPDGDTGNSERTFSCTTRHSIESD

SEQ ID NO: 1236 - protein, 1356 aa, Human coronavirus
MKLFLILLVLPLASCFFTCNSNANLSMLQLGVPDNSSTIVTGLLPTHWFCANQSTSVYSANGFFYIDVGNHRSAFALHTGYYDANQYYIYVTNEIGLNASVTLKICKFSRNTTFDFLSNASSSFDCIVNLLFTEQLGAPLGITISGETVRLHLYNVTRTFYVPAAYKLTKLSVKCYFNYSCVFSVVNATVTVNVTTHNGRVVNYTVCDDCNGYTDNIFSVQQDGRIPNGFPFNNWFLLTNGSTLVDGVSRLYQPLRLTCLWPVPGLKSSTGFVYFNATGSDVNCNGYQHNSVVDVMRYNLNFSANSLDNLKSGVIVFKTLQYDVLFYCSNSSSGVLDTTIPFGPSSQPYYCFINSTINTTHVSTFVGILPPTVREIVVARTGQFYINGFKYFDLGFIEAVNFNVTTASATDFWTVAFATFVDVLVNVSATNIQNLLYCDSPFEKLQCEHLQFGLQDGFYSANFLDDNVLPETYVALPIYYQHTDINFTATASFGGSCYVCKPHQVNISLNGNTSVCVRTSHFSIRYIYNRVKSGSPGDSSWHIYLKSGTCPFSFSKLNNFQKFKTICFSTVEVPGSCNFPLEATWHYTSYTIVGALYVTWSEGNSITGVPYPVSGIREFSNLVLNNCTKYNIYDYVGTGIIRSSNQSLAGGITYVSNSGNLLGFKNVSTGNIFIVTPCNQPDQVAVYQQSIIGAMTAVNESRYGLQNLLQLPNFYYVSNGGNNCTTAVMTYSNFGICADGSLIPVRPRNSSDNGISAIITANLSIPSNWTTSVQVEYLQITSTPIVVDCATYVCNGNPRCKNLLKQYTSACKTIEDALRLSAHLETNDVSSMLTFDSNAFSLANVTSFGDYNLSSVLPQRNIRSSRIAGRSALEDLLFSKVVTSGLGTVDVDYKSCTKGLSIADLACAQYYNGIMVLPGVADAERMAMYTGSLIGGMVLGGLTSAAAIPFSLALQARLNYVALQTDVLQENQKILAASFNKAINNIVASFSSVNDAITQTAEAIHTVTIALNKIQDVVNQQGSALNHLTSQLRHNFQAISNSIQAIYDRLDSIQADQQVDRLITGRLAALNAFVSQVLNKYTEVRGSRRLAQQKINECVKSQSNRYGFCGNGTHIFSIVNSAPDGLLFLHTVLLPTDYKNVKAWSGICVDGIYGYVLRQPNLVLYSDNGVFRVTSRVMFQPRLPVLSDFVQIYNCNVTFVNISRVELHTVIPDYVDVNKTLQEFAQNLPKYVKPNFDLTPFNLTYLNLSSELKQLEAKTASLFQTTVELQGLIDQINSTYVDLKLLNRFENYIKWPWWVWLIISVVFVVLLSLLVFCCLSTGCCGCCNCLTSSMRGCCDCGSTKLPYYEFEKVHVQ

SEQ ID NO: 1237 - protein, 206 aa, Orf virus
MSSSSNEPTPKPKPPAPMTQEEFNKEVEKRREQKKEKSRTVERESETVTVSADGTEKTRTYERESVKTTESEKNNNPSTNDNKDKVTDNQPKEDDKKLEETPKDSEKPTPTEKPANTSSGDNKKEGEEATLESQPTPAPTQPSNSEAPTQPPSSETPPTQPPSSTPSTQPPSSTPSTEPTPEPAPSTEPTTNANGTPAATTSETTA

SEQ ID NO: 1238 - protein, 354 aa, Human cytomegalovirus
MTPTTTTAELTTEFDYDEDATPCVFTDVLNQSKPVTLFLYGVVFLFGSIGNFLVIFTITWRRRIQCSGDVYFINLAAADLLFVCTLPLWMQYLLDHNSLASVPCTLLTACFYVAMFASLCFITEIALDRYYAIVYMRYRPVKQACLFSIFWWIFAVIIAIPHFMVVTKKDNQCMTDYDYLEVSYPIILNVELMLGAFVIPLSVISYCYYRISRIVAVSQSRHKGRIVRVLIAVVLVFIIFWLPYHLTLFVDTLKLLKWISSSCEFERSLKRALILTESLAFCHCCLNPLLYVFVGTKFRQELHCLLAEFRQRLFSRDVSWYHSMSFSRRSSPSRRETSSDTLSDEVCRVSQIIP

SEQ ID NO: 1239 - protein, 156 aa, Molluscum contagiosum virus
MAAPSLEGAVLRHKHRLLQLRDELDKEAFFLDEAYSALHTERYDDMHTHRLVLRDMLPARDYALAMSMSRITEREFEELYDMLALYASDATPSAQPGTNLGKELCRVLVGLFQQGCTRQEYYTGWARKLQTVIHARACARAPLLESALACLWKIEI

SEQ ID NO: 1240 - protein, 744 aa, Rotavirus C
MASSLYAQLISQNYYSLGNEILSDQQTNKVVSDYVDAGNYTYAQLPPTTWGSGSILKSAFSTPEITGPHTNTVIEWSNLINTNTWLLYQKPLNSVRLLKHGPDTYNSNLAAFELWYGKSGTTITSVYYNTINNQNKTHDANSDCLILFWNEGSTQLEKQVVTFNWNVGGILIKPINSSRMRICMSGMENFNNDSFNWENWNHEFPRSNPGININMYTEYFLASSDPYTYLKNLQQPTAKTVDMKMMKKMNDNSKLGDGPINVSNIISKDSLWQEVQYVRDITLQCKILSEIVKGGGWGYDYTSVTFKTVNHTYSYTRAGENVNAHVTISFNNVKERAYGGSLPTDFKIGRFDILDTDSYVYIDYWDDSEIFKNMVYVRDVRADIGGFQYSYSSEMSYYFQIPVGSYPGLHSSRLQLVYDRCLLSQQFTDYAALNSLRFVFRVVSTSGWFITTGDINTRRVASGTGFAYSDGHVANTVGTISFISLIPSNPNYQTPIASSSTVRMDLERKINDLRDDFNALASSVALSDILSLAMSPLTFSNLLESVPAITSSVKDVAASVMKKFRSTKMFKKAAKQNYREFVIGDLLEDVTNVARNNNSLNYSDITSAMMVSTTNRLQITDVDTFSEIVSRSADNFISNRSYRMIENNTVHEITPTRRFSYDIKTLQQRNFDIDKFSKLASQSPVISAIVDFATIKAIRDTYGISDDIIYKLVASDAPTILSFINQNNPLIRNRITNLINQCKL

SEQ ID NO: 1241 - protein, 1003 aa, Human immunodeficiency virus
FFRENLAFPQGKARELSSEQTRANSPTRRELQVWGRDNNSLSEAGADRQGTVSFSFPQITLWQRPLVTIKIGGQLKEALLDTGADDTVLEEMSLPGRWKPKMIGGIGGFIKVRQYDQIAIEICGHKAIGTVLVGPTPVNIIGRNLLTQIGCTLNFPISPIETVPVKLKPGMDGPKVKQWPLTEEKIKALVEICTEMEKEGKISKIGPENPYNTPVFAIKKKDSTKWRKLVDFRELNKRTQDFWEVQLGIPHPAGLKKKKSVTVLDVGDAYFSVPLDEDFRKYTAFTIPSINNETPGIRYQYNVLPQGWKGSPAIFQSSMTKILEPFRKQNPDIVIYQYMDDLYVGSDLEIGQHRIKIEELRHHLLKWGFTTPDKKHQKEPPFLWMGYELHPDKWTVQPIVLPEKDSWTVNDIQKLVGKLNWASQIYAGIKVKQLCKLLRGTKALTEVVPLTEEAELELAENREILKEPVHGVYYDPSKDLVAEIQKQGQGQWTYQIYQEPFKNLKTGKYARMRGAHTNDVKQLTEAVQKIAMESIVIWGKTPKFRLPIQKETWEAWWTEYWQATWIPEWEFVNTPPLVKLWYQLEKEPIVGAETFYVDGAANRETKAGKAGYVTDRGRQKVVPLTDTTNQKTELQAIHLALQDSGLEVNIVTDSQYALGIIQAQPDKSESELVNQIIEQLIKKEKVYLAWVPAHKGIGGNEQIDKLVSAGIRKVLFLDGIDKAQEDHEKYHSNWRAMASDFNLPPIVAKEIVASCDKCQLKGEAMHGQVDCSPGIWQLDCTHLEGKVILVAVHVASGYIEAEVIPTETGQETAYFILKLAGRWPVKTIHTDNGSNFTSNTVKAACWWAGIKQEFGIPYNPQSQGVVESMNNQLKKIIGQVRDQAEHLKTAVQMAVFIHNFKRKGGIGEYSAGERIVDIIATDIQTKELQKQITKIQNFRVYYRDSRDPLWKGPAKLLWKGEGAVVIQDNSDIKVVPRRKAKIIRDYGKQMAGDDCVASRQDED

SEQ ID NO: 1242 - protein, 764 aa, Bacillus anthracis
MKKRKVLIPLMALSTILVSSTGNLEVIQAEVKQENRLLNESESSSQGLLGYYFSDLNFQAPMVVTSSTTGDLSIPSSELENIPSENQYFQSAIWSGFIKVKKSDEYTFATSADNHVTMWVDDQEVINKASNSNKIRLEKGRLYQIKIQYQRENPTEKGLDFKLYWTDSQNKKEVISSDNLQLPELKQKSSNSRKKRSTSAGPTVPDRDNDGIPDSLEVEGYTVDVKNKRTFLSPWISNIHEKKGLTKYKSSPEKWSTASDPYSDFEKVTGRIDKNVSPEARHPLVAAYPIVHVDMENIILSKNEDQSTQNTDSQTRTISKNTSTSRTHTSEVHGNAEVHASFFDIGGSVSAGFSNSNSSTVAIDHSLSLAGERTWAETMGLNTADTARLNANIRYVNTGTAPIYNVLPTTSLVLGKNQTLATIKAKENQLSQILAPNNYYPSKNLAPIALNAQDDFSSTPITMNYNQFLELEKTKQLRLDTDQVYGNIATYNFENGRVRVDTGSNWSEVLPQIQETTARIIFNGKDLNLVERRIAAVNPSDPLETTKPDMTLKEALKIAFGFNEPNGNLQYQGKDITEFDFNFDQQTSQNIKNQLAELNATNIYTVLDKIKLNAKMNILIRDKRFHYDRNNIAVGADESVVKEAHREVINSSTEGLLLNIDKDIRKILSGYIVEIEDTEGLKEVINDRYDMLNISSLRQDGKTFIDFKKYNDKLPLYISNPNYKVNVYAVTKENTIINPSENGDTSTNGIKKILIFSKKGYEIG

SEQ ID NO: 1243 - protein, 356 aa, Escherichia coli
MSTVTITDLARENVRNLTPYQSARRLGGNGDVWLNANEYPTAVEFQLTQQTLNRYPECQPKAVIENYAQYAGVKPEQVLVSRGADEGIELLIRAFCEPGKDAILYCPPTYGMYSVSAETIGVECRTVPTLENWQLDLQGISDKLDGVKVVYVCSPNNPTGQLINPQDFRTLLELTRGKAIVVADEAYIEFCPQASLAGWLAEYPHLAILRTLSKAFALAGLRCGFTLANEEVINLLMKVIAPYPLSTPVADIAAQALSPQGIIAMRERVAQIIAEREYLIAALKEIPCVEQVFDSETNYILARFKASSAVFKSLWDQGIILRDQNKQPSLSGCLRITVGTREESQRVIDALRAEQV

SEQ ID NO: 1244 - protein, 257 aa, Staphylococcus epidermidis
MKKIATATIATAGIATFAFAHHDAQAAEQNNDGYNPNDPYSYSYTYTIDAEGNYHYTWKGNWSPDRVNTSYNYNNYNNYNYYGYNNYSNYNNYSNYNNYNNYQSNNTQSQRTTQPTGGLGASYSTSSSNVHVTTTSAPSSNGVSLSNARSASGNLYTSGQCTYYVFDRVGGKIGSTWGNANNWANAAARSGYTVNNSPAKGAILQTSQGAYGHVAYVEGVNSNGSIRVSEMNYGHGAGVVTSRTISASQAASYNYIH

SEQ ID NO: 1245 - protein, 376 aa, Salmonella typhimurium
MKVLTVFGTRPEAIKMAPLVHALEKDPHFEAKVCVTAQHREMLDQVLTLFSIVPDYDLNIMQPGQGLTEITCRILEGLKPILADFKPDVVLVHGDTTTTIATSLAAFYQRIPVGHVEAGLRTGDLYSPWPEEANRTLTGHLAMYHFAPTENSRQNLLRENIPDERIFVTGNTVIDALIWVRDRVLTSDTLQAELAEQYPFLNANKKMILVTGHRRESFGQGFEHICQALAEIAAANQNVQIVYPVHLNPNVSEPVNRILGHVENVVLIEPQDYLPFVWLMNHAWLILTDSGGIQEEAPSLGKPVLVMRETTERPEAITAGTVRLIGTDSRRIVAEVMRLLHDENEYQTMSRAHNPYGDGQSCARILQALKSYRVSL

SEQ ID NO: 1246 - protein, 473 aa, Salmonella muenchen
MSKLIPVIMAGGIGSRLWPLSREEHPKQFLSVDGELSMLQNTIKRLTPLLAGEPLVICNDSHRFLVAEQLRAINKLANNIILEPVGRNTAPAIALAAFCSLQNVVDEDPLLLVLAADHVIRDEKVFLKAINHAEFFATQGKLVTFGIVPTQAETGYGYICRGEAIGEDAFSVAEFVEKPDFDTARHYVESEKYYWNSGMFLFRASSYLQELKDLSPDIYQACENAVGSINPDLDFIRIDKEAFAMCPSDSIDYAVMEHTRHAVVVPMNAGWSDVGSWSSLWDISKKDPQRNVLHGDIFAYNSKDNYIYSEKSFISTIGVNNLVIVQTADALLVSDKDSVQDVKKVVDYLKANNRNEHKKHLEVFRPWGKFSVIHSGDNYLVKRITVKPGAKFAAQMHLHRAEHWIVVSGTACITKGEEIFTISENESTFIPANTVHTLKNPATIPLELIEIQSGTYLAEDDIIRLEKHSGYLE

SEQ ID NO: 1247 - protein, 463 aa, Pectobacterium carotovorum
MTLGQFGGLFVVYLISVIFILSLTWMEFRRVRFNFNVLFSLLYLLTFYFGFPFTCVLVFRFGVDVVPVQFLLQAMLSATAFYAIYYVSYKTRLRQKTSVPRAPLLTVNRVEANLTWLLLALIAVATVGIFFLNNGFLLFKLRSYSQIFSSDVSGVALKRFFYFFIPAMLVVYFLRQTQRAWLMFLIGTVAFGMLTYVIVGGTRANLIIAFALFLFIGIVRGWITLWMLVAAGAFGIVGMFWLALKRYGLDVSGDYAFYTFLYLTRDTFSPWENLALLWQNYDKIEFQGLAPIARDFYVFIPSWLWPDRPNLVLNSANYFTWEVLNNHSGLAISPTLLGSLVVMGGVLFIPLGAIAVGLVIKWFDWVYELGKNDSNRYKAAILQAFCFGAVFNIIVLTREGVDSFVSRVVFFCLVFGLCLLVAKLLYWLLESAGLIRQRLMRMRATPLVPTPNTVPDPVIKEQL

SEQ ID NO: 1248 - protein, 284 aa, Mycobacterium tuberculosis
MPNRRRRKLSTAMSAVAALAVASPCAYFLVYESTETTERPEHHEFKQAAVLTDLPGELMSALSQGLSQFGINIPPVPSLTGSGDASTGLTGPGLTSPGLTSPGLTSPGLTDPALTSPGLTPTLPGSLAAPGTTLAPTPGVGANPALTNPALTSPTGATPGLTSPTGLDPALGGANEIPITTPVGLDPGADGTYPILGDPTLGTIPSSPATTSTGGGGLVNDVMQVANELGASQAIDLLKGVLMPSIMQAVQNGGAAAPAASPPVPPIPAAAAVPPTDPITVPVA

SEQ ID NO: 1249 - protein, 331 aa, Escherichia coli
MQPKIYWIDNLRGIACLMVVMIHTTTWYVTNAHSVSPVTWDIANVLNSASRVSVPLFFMISGYLFFGERSAQPRHFLRIGLCLIFYSAIALLYIALFTSINMELALKNLLQKPVFYHLWFFFAIAVIYLVSPLIQVKNVGGKMLLVLMAVIGIIANPNTVPQKIDGFEWLPINLYINGDTFYYILYGMLGRAIGMMDTQHKALSWVSAALFATGVFIISRGTLYELQWRGNFADTWYLYCGPMVFICAIALLTLVKNTLDTRTIRGLGLISRHSLGIYGFHALIIHALRTRGIELKNWPILDIIWIFCATLAASLLLSMLVQRIDRNRLVS

SEQ ID NO: 1250 - protein, 550 aa, Ehrlichia chaffeensis
MANVVVTGEQLDKSIREVVRILEDAVGCTAGPKGLTVAIGKSYGAPEVTKDGYKVIKSIKPEDPLALAIANIITQSASQCNDKVGDGTTTCSILTAKVIEEVSKAKAAGADIVCIKEGVLKAKEAVLEALMSMKREVLSEEEIAQVATISANGDKNIGSKIAQCVQEVGKDGVITVEESKGFKELDVEKTDGMQFDRGYLSPYFVTNSEKMLVEFENPYILLTEKKLNIIQPILPILENVARSGRPLLIIAEDVEGEALSTLVLNKLRGGLHVAAVKAPGFGDRRKDMLGDIAILTGAKHVISDDLAIKMEDLTLAELGTAKNIRITKDTTTIIGSVDNSSANVQSRINQIKMQIEASTSDYDKEKLRERLAKLSGGVAVLKVGGSSEVEVKERKDRVEDALHATRAAVEEGVVPGGGAALLYTLSVLENLKSKNDDEQLGINIVKRALQAPIKRIIKNSGSENAPCVIAHLLKQNDKELIFNVDTMNFANAFTSGVIDPLKVVRIAFDFAVSLAAVFMTLNAIVVDVPSKDDANAGAGGMGGMGGMGGF

SEQ ID NO: 1251 - protein, 572 aa, Yersinia enterocolitica
MPQISRQEYAGLFGPTTGDKIRLGDTNLFIEIEKDLRGYGEESVYGGGKSLRDGMGANNHLTRDNGVLDLVITNVTIVDARLGVIKADVGIRDGKIAGIGKSGNPGVMDGVTPGMVVGVSTDAISGEHLILTAAGIDSHIHLISPQQAYHALSNGVATFFGGGIGPTDGTNGTTVTPGPWNIRQMLRSVEGLPVNVGILGKGNSYGRGPLLEQAIAGVVGYKVHEDWGATANALRHSLRMADEMDIQVSVHTDSLNECGYVEDTIDAFEGRTIHTFHTEGAGGGHAPDIIRVASQPNVLPSSTNPTLPYGVNSQAELFDMIMVCHNLNPNVPADVSFAESRVRPETIAAENVLHDMGVISMFSSDSQAMGRVGENWLRVMQTANAMKASRGKLPEDAPGNDNFRVLRYVAKITINPAIAQGVSHVIGSVEVGKMADLVLWDPRFFGAKPKMVIKGGMINWAAMGDPNASLPTPQPVFYRPMFGAMGKTMQDTCVTFVSQAALDDGVKEKAGLDRQVIAVKNCRTISKHDLVRNDQTPNIEVDPETFAVKVDGVHATCEPIDTAAMNQRYFFG

SEQ ID NO: 1252 - protein, 998 aa, Rickettsia akari
GGFMSQDHTGYENDEGYESDIDEKTQEQAAPAQPTLDTADDGFSFTPASSTQSTPAISTLSGTISTDDQISDPITKAVREIIIQQQKDEIAEQILKDLAALVDRDLAEQKRKEIEEEKEKDKKLSVFFGNPANREFIDNALEKPELKKKLESIEITGYKNILLTYSAANGYHGGFKPVQWENQISASDLRATVVKNDAGDELCTLNETTVKTKPFTVAKKDGTQVQINSYRAIDFPIKLDKADGSMHLSMVALKADGTKPSKDRAVYFTAHYEEGPNGKPQLKEISSPQPLKFAGDGPDAVAYIEHGGEIYTLAVTRGKYKEMMKEVELHQGQSVDLSQIIAEDLTKVQGRSQETLQPIITPNQELKSSIETPTTTQVPPITPASQPVHTETSQMPQSQQVNPNLFNAATALSCSMQDLLNYVNAGLTKEKDGNTQIDLINEAATAILNNEKEKQANFITLTKNMVNNNALTPDTKVARVNAVLETIKNNQDTPDIEKSKMLEATVAITLNSENLTPKQKQQMLEKAVDVDLSFKDDTSRAVAIDGITGAVIKSNLSTKDKGTMLIAVGDKVNASELSNAEKQQLLGSVLKKGVETKILSPEQQQLMQQNLDKITAEQTKNDNITEVQGILANPAFNTIAKTAAIQKVTTKVLDSPITAEIKGETLESITKIVAESPLNVQDKTDIVKGMGEAIASHRTMAPTKKIAAIESVETGVAKSITDLEDKKLMTKGLVDGIYEDKANPEITSEMMKAVSKGVDNSTAIPEDKQALKDAASEAALDRATQNFTEGLKGQNLDEPKPRDDIYNKAQDIAYALKNVVTTVLDANPEKREVSEEEVMNKTSSILNDISKIAIEKVNNLRAMLSPDSNLKTLEEKKAEATKKVDELVKEFGTKSSTEEQQSFIQANLIDDKTLSKEVRLQTIDKLLQEQAQKRAEAIKNPNVKTEDLRVVSGQSALKPISNDEPDIEKTKMVVGRDRVNIKDNIKIMGALMNARDSI

SEQ ID NO: 1253 - protein, 120 aa, Mycobacterium tuberculosis
MSTQRPRHSGIRAVGPYAWAGRCGRIGRWGVHQEAMMNLAIWHPRKVQSATIYQVTDRSHDGRTARVPGDEITSTVSGWLSELGTQSPLADELARAVRIGDWPAAYAIGEHLSVEIAVAV

SEQ ID NO: 1254 - protein, 158 aa, Yersinia pseudotuberculosis
MKMKCFAKNALAVTTLMIAACGMANASTVINSKDVSGEVTVKQGNTFHVDFAPNTGEIFAGKQPGDVTMFTLTMGDTAPHGGWRLIPTGDSKGGYMISADGDYVGLYSYMMSWVGIDNNWYINDDSPKDIKDHLYVKAGTVLKPTTYKFTGRVEEYVF

SEQ ID NO: 1255 - protein, 210 aa, Mycobacterium tuberculosis
MIATTRDREGATMITFRLRLPCRTILRVFSRNPLVRGTDRLEAVVMLLAVTVSLLTIPFAAAAGTAVQDSRSHVYAHQAQTRHPATATVIDHEGVIDSNTTATSAPPRTKITVPARWVVNGIERSGEVNAKPGTKSGDRVGIWVDSAGQLVDEPAPPARAIADAALAALGLWLSVAAVAGALLALTRAILIRVRNASWQHDIDSLFCTQR

SEQ ID NO: 1256 - protein, 386 aa, Coxiella burnetii
MFELGETSPQNAQIKVIGIGGGGGNAIEHMIAENIDGVEFVCANTDSQALGRSNARVVLQLGDEITKGLGAGADPSVGRQAAEEARDRIREILEGTDMVFLTAGMGGGTGTGAAPIFAEVAKELGILTVAVVTKPFVFEGKKRMDVAEEGIKALGNYVDSLITIPNNKLLNVLGKNITLLNAFKAANNVLLGAVQGIADLITRPGLINVDFADVRTVMSEMGMAMMGTGVSSGENRAREAAEAAIASPLLEDVDFTGARGVLVNITAGMDLSIGEFEQVGEAVKAFASETATVVIGTVIDPDMSDELRVTVVVTGLGSHAGGGAGVPLKPVKNTKNDGTLDYHQLDRPTYMRNQEPSKRTVDLEEQRDRDFEYLDIPAFLRRLEED

SEQ ID NO: 1257 - protein, 175 aa, Staphylococcus aureus
MNKTSKVCVAATLALGTLIGVTVVENSAPTSKQAQAAITPYYTYNGYIGNNANFILDKNFINAIKYDNVKFNGIKLAKTNTIKKVEKYDQTFKGVSAKGNEASQLQFVVKNNISLKDIQKAYGKDLKKENGKTKEADSGIFYYQNAKKTLGIWFVVDHNRVVEVTVGHTPYKTSK

SEQ ID NO: 1258 - protein, 1039 aa, Escherichia coli
MKRHLNTCYRLVWNHMTGAFVVASELARARGKRGGVAVALSLAAVTSLPVLAADIVVHPGETVNGGTLANHDNQIVFGTTNGMTISTGLEYGPDNEANTGGQWVQDGGTANKTTVTSGGLQRVNPGGSVSDTVISAGGGQSLQGRAVNTTLNGGEQWMHEGAIATGTVINDKGWQVVKPGTVATDTVVNTGAEGGPDAENGDTGQFVRGDAVRTTINKNGRQIVRAEGTANTTVVYAGGDQTVHGHALDTTLNGGYQYVHNGGTASDTVVNSDGWQIVKNGGVAGNTTVNQKGRLQVDAGGTATNVTLKQGGALVTSTAATVTGINRLGAFSVVEGKADNVVLENGGRLDVLTGHTATNTRVDDGGTLDVRNGGTATTVSMGNGGVLLADSGAAVSGTRSDGKAFSIGGGQADALMLEKGSSFTLNAGDTATDTTVNGGLFTARGGTLAGTTTLNNGAILTLSGKTVNNDTLTIREGDALLQGGSLTGNGSVEKSGSGTLTVSNTTLTQKAVNLNEGTLTLNDSTVTTDVIAQRGTALKLTGSTVLNGAIDPTNVTLASGATWNIPDNATVQSVVDDLSHAGQIHFTSTRTGKFVPATLKVKNLNGQNGTISLRVRPDMAQNNADRLVIDGGRATGKTILNLVNAGNSASGLATSGKGIQVVEAINGATTEEGAFVQGNRLQAGAFNYSLNRDSDESWYLRSENAYRAEVPLYASMLTQAMDYDRIVAGSRSHQTGVNGENNSVRLSIQGGHLGHDNNGGIARGATPESSGSYGFVRLEGDLMRTEVAGMSVTAGVYGAAGHSSVDVKDDDGSRAGTVRDDAGSLGGYLNLVHTSSGLWADIVAQGTRHSMKASSDNNDFRARGWGWLGSLETGLPFSITDNLMLEPQLQYTWQGLSLDDGKDNAGYVKFGHGSAQHVRAGFRLGSHNDMTFGEGTSSRAPLRDSAKHSVSELPVNWWVQPSVIRTFSSRGDMRVGTSTAGSGMTFSPSQNGTSLDLQAGLEARVRENITLGVQAGYAHSVSGSSAEGYNGQATLNVTF

SEQ ID NO: 1259 - protein, 196 aa, Escherichia coli
MNVVILGTGCANLNSVKSAIARHGYEPKVSRDPDVVLLADKLFLPGVGTAQAAMDQVRERELFDLIKACTQPVLGICLGMQLLGRRSEESNGVDLLGIIDEDVPKMTDFGLPLPHMGWNRVYPQAGNRLFQGIEDGAYFYFVHSYAMPVNPWTIAQCNYGEPFTAAVQKDNFYGVQFHPERSGAAGAKLLKNFLEM

SEQ ID NO: 1260 - protein, 1528 aa, Streptococcus downei
MLQKCKLEGIIICNEKRLLGAAKVKSGRTLSGALLGTAILASGAGQKALAEETSTTSTSGGDTAVVGTETGNPATNLPDKQDNPSSQAETSQAQARQKTGAMSVDVSTSELDEAAKSPQEAGVTVSQDATVNKGTVEPSDEANQKEPEIKDDYSKQAADIQKATEDYKASVAANQAETDRINQEIAAKKAQYEQDLAANKAEVERSLMRMRKPRPIYEAKLAQNQKDLAAIQQANSDSQAAYAAAKEAYDKEWARVQAANAAAKKAYEEALAANTAKNDQIKAEIEAIQQRSAKADYEAKLAQYEKDLAAAQAGNAANEADYQAKKAAYEQELARVQAANAAAKQAYEQALAANSAKNAQITAENEAIQQNAQAKADYEAKLAQYQKDLAAAQSGNAANEADYQEKLAAYEKELARVQAANAAAKQAYEQQVQQANAKNAEITEANRAIRERNAKAKTDYELKLSKYQEELAQYKKDLAEYPAKLQAYQDEQAAIKAALAELEKHKNEDGNLSEPSAQSLVYDLEPNAQVALVTDGKLLKASALDEAFSHDEKNYNNHLLQPDNLNVTYLEQADDVASSVELFGNFGDKAGWTTTVSNGAEVKFASVLLKRGQSATATYTNLKNSYYNGKKISKVVYKYTVDPDSKFQNPTGNVWLGIFTDPTLGVFASAYTGQNEKDTSIFIKNEFTFYDEDGNPIDFDNALLSVASLNREHNSIEMAKDYSGTFVKISGSSIGEKNGMIYATDTLNFKKGEGGSLHTMYTRASEPGSGWDSADAPNSWYGAGAVRMSGPNNYITLGATSATNVLSLAEMPQVPGKDNTAGKKPNIWYSLNGKIRAVNVPKVTKEKPTPPVEPTKPDEPTYEVEKELVDLPVEPKYEPEPTPPSKNPDQSIPEKPVEPTYEVEKELEPAPVEPSYEKEPTPPQSTPDQEEPEKPVEPSYQSLPTPPVEPVYETVPGPVSVPTVRYHYYKLAVQPGVTKEIKNQDDLDIDKTLVAKQSTVKFQLKTADLPAGRPETTSFVLMDPLPSGYQLNLEATKVASPGFEASYDAMTHTVTFTATAETLAALNQDLTKAVATIYPTVVGQVLNDGATYTNNFTLMVNDAYGIKSNIVRVTTPGKPNDPDNPSNNYITPHKVNKNENGVVIDGKSVLAGTTNYYELTWDLDQYKGDKSAKEIIQKGFFYVDDYPEEALDLRTDLIKLTDANGKAVTGVSVADYASLEAAPAAVQDMLKKANIIPKGAFQVFTADDPQAFYDAYVVTGTDLTIVTPMTVKAEMGKTGGSYENRAYQIDFGNGYESNLVVNNVPKINPEKDVTLTMDPADSTNVDGQTIALNQVFNYRLIGGIIPADHAEELFEYSFSDDYDQTGDQYTGQYKAFAKVDLTLKDGTIIKAGTDLTSYTEAQVDEANGQIVVTFKEDFLRSVSVDSAFQAEVYLQMKRIAVGTFANTYVNTVNGITYSSNTVRTSTPEPKQPSPVDPKTTTTVVFQPRQGKAYQPAPPAGAQLPATGDSSNAYLPLLGLVSLTAGFSC

SEQ ID NO: 1261 - protein, 359 aa, Salmonella typhimurium
MTVLIHVLGSDIPHHNHTVLRFFNDTLAATSEHAREFMVAGEDNGFTESCPALSLRFYGSKKALAQAVIAKAKANRRQRFFFHGQFNTSLWLALLSGGIKPAQFYWHIWGADLYEVSHGLKFRLFYPLRRIAQGRVGGVFATRGDLSYFARQHPDVRGELLYFPTRMDPSLNAMAKERQRAGKLTILVGNSGDRSNQHIAALRAVYQQFGDTVNVVVPMGYPANNQDYIDEVRQAGLALFSAENLQILSEKMEFDAYLALLRQCDLGYFIFARQQGIGTLCLLIQADIPCVLNRDNPFWQDMAEQHLPVLFTTDDLNEQVVREAQRQLASVDKSGITFFSPNYLQPWHNALRIAAGEAE

SEQ ID NO: 1262 - protein, 268 aa, Pseudomonas aeruginosa
MRLVLEEPFKRLWNGRDPFEAVEALQGKVYRELEGRRTLRTEVDGRGYFVKIHRGIGWGEIAKNLLTAKLPVLGARQEWQAIRRLHEAGVATMTAVAYGERGSDPARQHSFIVTEELAPTVDLEVFSQDWRERPPPPRLKRALVEAVARMVGDMHRAGVNHRDCYICHFLLHTDKPVSADDFRLSVIDLHRAQTRDATPKRWRNKDLAALYFSALDIGLTRRDKLRFLRTYFRRPLREILRDEAGLLAWMERKAEKLYERKQRYGDLL

SEQ ID NO: 1263 - protein, 348 aa, Escherichia coli
MTQPMPGKPAEDAENELDIRGLFRTLWAGKLWIIGMGLAFALIALAYTFFARQEWSSTAITDRPTVNMLGGYYSQQQFLRNLDVRSNMASADQPSVMDEAYKEFVMQLASWDTRREFWLQTDYYKQRMVGNSKADAALLDEMINNIQFIPGDFTRAVNDSVKLIAETAPDANNLLRQYVAFASQRAASHLNDELKGAWAARTIQMKAQVKRQEEVAKAIYDRRMNSIEQALKIAEQHNISRSATDVPAEELPDSEMFLLGRPMLQARLENLQAVGPAFDLDYDQNRAMLNTLNVGPTLDPRFQTYRYLRTPEEPVKRDSPRRAFLMIMWGIVGGLIGAGVALTRRCSK

SEQ ID NO: 1264 - protein, 526 aa, Mycobacterium smegmatis
MSEELKYELPGLERKAHECESTRPEGPGDATKPDELATTASVYGKLMASAAKLKATFAAGDREGKRIAAAIRAAAGAYQKIEEQKAAELNRQMNGSDAPPPAAEAVVPDMSGIPGPLTIPSMEYPSAAAAADEMDWEAAARIIHSGDTQALSMKYFRDQWRDYQSTLEGHGRHFANPAEGWSGAAAETCAEAQRRLSTWWADMGAECGRLAQEATTFVDAHDKLVANHPTMDDVKAFEEAEWESEWDRQYAWAIKQEKSEDALEAYANGSQIQEIRPGKPPSIGGLPAVNDGDVQATPTSTTGGPGGPGSGSGGGSGGGASGGSGGGTPEMPELPSTDPSMSPMSTNSAGEEQSSGSPSSGGSSSGGSPSGGSPSGGGAPSSGGMPEGGLPTDMPGGPDIPGLDDPSLKPASAGGGGGGGVGGGGGGGMPAAPLGPAVGADSVSPSPSSTRGGGVGVPTGTGGGAGGMMGGGMGGMGAGHGQGQGKEKKRDPKLAPDEDLYTEDRAHSEGVIGHRPRREKDSGKQQ

SEQ ID NO: 1265 - protein, 246 aa, Escherichia coli
MNNNTTAPTYTLRGLQLIGWRDMQHALDYLFADGQLKQGTLVAINAEKMLTIEDNAEVRELINAAEFKYADGISVVRSVRKKYPQAQVSRVAGADLWEELMARAGKEGTPVFLVGGKPEVLAQTEAKLRNQWNVNIVGSQDGYFKPEQRQALFERIHASGAQIVTVAMGSPKQEIFMRDCRLVHPDALYMGVGGTYDVFTGHVKRAPKIWQTLGLEWLYRLLSQPSRIKRQLRLLRYLRWHYTGNL

SEQ ID NO: 1266 - protein, 301 aa, Yersinia pestis
MLKQMTVNSIIQYIEENLESKFINIDCLVLYSGFSRRYLQISFKEYVGMPIGTYIRVRRASRAAALLRLTRLTIIEISAKLFYDSQQTFTREFKKIFGYTPRQYRMIPFWSFKGLLGRREINCEYLQPRICYLKERNIIGQCFNFRDLVFYSGIDSKCRLGKLYDSLKKNTAITVSNRIPFHDKTNDIIARTVVWDRNKHFSDSEIKVDKGLYAYFFFNDTYDQYVHHMYNIYYNSLPIYNLNKRDGYDVEVIKRRNDNTIDCHYFLPIYCDDMEFYNEMQVYHNNIVKPEMSVTLGLPKS

SEQ ID NO: 1267 - protein, 146 aa, Coxiella burnetii
MDNYKKILVALALDPNSDRPLVEKAKELSANRDAQLYLIHAVEHLSSYGAAYGVAAGVDVEDMLLEEAKKRMNEIASQLNISSDHQIVKVGPAKFLILEQAKNWGVDLIIVGSHGRHGIQLLLGSTSNAVLHGAKCDVLAVRIKGS

SEQ ID NO: 1268 - protein, 991 aa, Rickettsia australis
YENDEEYESGIDEKKQEKAALAQPTLDTADDGFSFTPASSTQSTPSISTLSDTISHDGQTSDPITKAVRETIIQPQKDEIAEQILKDLAALVDRDLAEQKRKEIEEEKEKNKTLSAFFGNPANRELIDKALEKPELKKKLEAIEIAGLKNVFLTYIAANGYSGGFKPVQWENQISASDLRATVVKNDAGDELCTLNETTVKTKPFTVAKQDGTQVQINSYREIDFPIKLDKADGSMHLSMVALKADGTKPSKDKAVYFTAHYEEGPNGKPQLKEISSPKPLKFAGDGPDAVAYIEHGGEIYTLAVTRGKYKEMMKEVELHQGQSVDLSQTIAKDLTKVQGRSQETLQPIITPNQELKSSIETPTTTQVPPITPDSQPLQTETAQMPQSQQVNPNLLNAATALSGSMQDLLNYVNAGLTKEKDGNTQIDLINAAATAILNNEKEKQANIIVLTENTVNNNALTPDTKVAGVNAVLENIKNNQNTPDLEKSKMLEATVAIALNSENLAPKQKQQMLEKAVDVGLNLKDDTSRAVAIDGITDTVIKSNLSTKDKGTMLIAVGDKVNASELSNAEKQQLLGSVLKKGVETQVLSPEQQQLMQQHLDKITAEQTKNAKITEVQGILANPAFNTIAKTEAIQNVTTKVLDSPIKAEIKGETLESITKVVAESPLNGQDKVDIVKGMGEAIASHKTMSPTEKISAIESVETGVAESITALEDKKLMTKGLVDGIYEDKANPEMTKAVSRGVDKSTARPEDKQALKDAASEVALDRETQNFTKGLKEQNLEKPKPRDDIYNKAQDVAEALKNVITPVLDAHPEKREVSEEEVMKKTSSILNDISNLTIEKVNNFRAMLSPDSNLKTLEEKKAEATKKVDELVKEFGTKSSTEEQQSFIKANLTDDKTLSKEVRLQTIDKLLQEQAQKRAKAIENPNVKTEDVRVVSEQSELKPISNDEPGIEKTKMVVGRDRVNIKDNIKIIGALMNARDSIIQSENLP

SEQ ID NO: 1269 - protein, 466 aa, Mycobacterium tuberculosis
MPRIRKPPSRSLPEPSAALANTTTRNLWLHFARHGAGIQHPVIVRGDGVTIFDDRGKSYLDALSGLFVVQVGYGRAELAEAAARQAGTLGYFPLWGYATPPAIELAERLARYAPGDLNRVFFTSGGTEAVETAWKVAKQYFKLTGKPGKQKVISRSIAYHGTTQGALAITGLPLFKAPFEPLTPGGFRVPNTNFYRAPLHTDLKEFGRWAADRIAEAIEFEGPDTVAAVFLEPVQNAGGCIPAPPGYFERVREICDRYDVLLVSDEVICAFGRIGSMFACEDLGYVPDMITCAKGLTSGYSPLGAMIASDRLFEPFNDGETMFAHGYTFGGHPVSAAVGLANLDIFEREGLSDHVKRNSPALRATLEKLYDLPIVGDIRGEGYFFGIELVKDQATKQTFTDDERARLLGQVSAALFEAGLYCRTDDRGDPVVQVAPPLISGQPEFDTIETILRSVLTDTGRKYLHL

SEQ ID NO: 1270 - protein, 162 aa, Yersinia pestis
MKAKSLTLISITVMFFLFLIYSFNDLFFYSEVKYGDIHEHLDLRMQGIRFSLSHYIIDDKSQLVISEGIYGIGLKMPTGKYYLFPLHSYQSSPDNMARGSLNSLASPLSLYVYEIHNKKNNVVTFFNGDRGFIDVNGETIHLSSLFLGVQGEHIHTSYHDVS

SEQ ID NO: 1271 - protein, 359 aa, Shigella flexneri
MTVLIHVLGSDIPHHNRTVLRFFNDALAATSEHAREFMVVGKDDGLSDSCPALSVQFFPGKKSLAEAVIAKAKANRQQRFFFHGQFNPTLWLALLSGGIKPSQFFWHIWGADLYELSSGLRYKLFYPLRRLAQKRVGCVFATRGDLSFFAKTHPKVRGELLYFPTRMDPSLNTMANDRQREGKMTILVGNSGDRSNEHVAALRAVHQQFGDTVKVVVPMGYPPNNEAYIEEVRQAGLELFSEENLQILSEKLEFDAYLALLRQCDLGYFIFARQQGIGTLCLLIQAGIPCVLNRENPFWQDMTEQHLPVLFTTDDLNEDIVREAQRQLASADKNTIAFFSPNYLQGWQRALAIAAGEVA

SEQ ID NO: 1272 - protein, 180 aa, Escherichia coli
MKLKFISMAVFSALTLGVATNASAVTTVNGGTVHFKGEVVNAACAVNTNSFDQTVNLGQVRSERLKVDGAKSNPVGFTIELNDCDSQVSAGAGIVFSGPAVTGKTDVLALQSSAAGSATNVGVQITDHTGKVVPLDGTASSTFTLTDGTNKIPFQAVYYATGQATAGIANADATFKVQYQ

SEQ ID NO: 1273 - protein, 175 aa, Staphylococcus aureus; identical to SEQ ID NO: 1257

SEQ ID NO: 1274 - protein, 374 aa, Mycobacterium tuberculosis
MKIRLHTLLAVLTAAPLLLAAAGCGSKPPSGSPETGAGAGTVATTPASSPVTLAETGSTLLYPLFNLWGPAFHERYPNVTITAQGTGSGAGIAQAAAGTVNIGASDAYLSEGDMAAHKGLMNIALAISAQQVNYNLPGVSEHLKLNGKVLAAMYQGTIKTWDDPQIAALNPGVNLPGTAVVPLHRSDGSGDTFLFTQYLSKQDPEGWGKSPGFGTTVDFPAVPGALGENGNGGMVTGCAETPGCVAYIGISFLDQASQRGLGEAQLGNSSGNFLLPDAQSIQAAAAGFASKTPANQAISMIDGPAPDGYPIINYEYAIVNNRQKDAATAQTLQAFLHWAITDGNKASFLDQVHFQPLPPAVVKLSDALIATISS

SEQ ID NO: 1275 - protein, 251 aa, Pseudomonas aeruginosa
MVRRRVIPCLLLKDRGLVKTVKFKEPKYVGDPINAIRIFNEKEVDELILLDIDASRLNQEPNYELIAEVAGECFMPICYGGGIKTLEHAEKIFSLGVEKVSINTAALMDLSLIRRIADKFGSQSVVGSIDCRKGFWGGHSVFSENGTRDMKRSPLEWAQALEEAGVGEIFLNSIDRDGVQKGFDNALVENIASNVHVPVIACGGAGSIADLIDLFERTCVSAVAAGSLFVFHGKHRAVLISYPDVNKLDVG

SEQ ID NO: 1276 - protein, 408 aa, Mycobacterium leprae
MFDFMVYSPEVNAFLMSRGPGSTPLWGAAEAWISLAEQLMEAAQEVSDTIVVAVPASFAGETSDMLASRVSTFVAWLDGNAENAGLIARVLHAVAYAFEEARAGMVPLLTVLGNIIHTMALKAINWFGQVSTTVAALEADYDLMWVQNSTAMTTYRDTVLRETGKMENFEPAPQLVSRYCMDRRDSVNSFHSSSSSDSLYESIDNLYDSVAQSEEHGSDSMSQSYNTCGSVAQSELCDSPFGTPSQSSQSNDLSATSLTQQLGGLDSIISSASASLLTTNSISSSTASSIMPIVASQVTETLGRSQVAVEKMIQSISSTAVSVDVAASKVVAGVGQAVSVGALRVPENWATASQPVMATAHSVPAGCSAITTAVSGPLEGVTQPAEEVLTASVAGGSGTGGPAFNEAV

SEQ ID NO: 1277 - protein, 246 aa, Salmonella choleraesuis
MTNNAAAPLYSLRGLPLIGWRDMSHALNYLFADGQLKQGTLVAINAEKLLTAEDNPEVRALIAAAEFKYADGISVVRSIRKKFPQAQVSRVAGADLWEALMARAGKEGTPVFLVGGKPEVLAQTEAKLRTQWNVNIVGSQDGYFTPEQRQALFARIHASGAKIVTVAMGSPKQELLMRDCREVHPHALYMGVGGTYDVFTGHVKRAPKIWQNLGLEWLYRLLSQPKRITRQMRLLRYLRWHYTGDL

SEQ ID NO: 1278 - protein, 314 aa, Salmonella typhimurium
MKITLIIPTYNAGSLWPNVLDAIKQQTIYPDKLIVIDSGSKDETVPLASDLKNISIFNIDSKDFNHGGTRNLAVAKTLDADVIIFLTQDAILADSDAIKNLVYYFSDPLIAAVCGRQLPHKDANPLAVHARNFNYSSKSIVKSKADIEKLGIKTVFMSNSFAAYRRSVFEELSGFPEHTILAEDMFMAAKMIQAGYKVAYCAEAVVRHSHNYTPREEFQRYFDTGVFHACSPWIQRDFGGAGGEGFRFVKSEIQFLLKNAPFWIPRALLTTFAKFLGYKLGKHWQSLPLSTCRYFSMYKSYWNNIQYSSSKEIK

SEQ ID NO: 1279 - protein, 452 aa, Salmonella schwarzengrund
MSLMQFSGLLVVWLLSTLFIATLTWFEFRRVRFNFNVFFSLLFLLTFFFGFPLTSVLVFRFDVGVAPPEILLQALLSAACFYGVYYVTYKTRLRKRVVDVPRKPLFTMNRVETHLTWVILMGIALVSVAIFFMHNGFLLFRLHSYSQIFSSEVSGVALKRFFYFFIPAMLVVYFLRQDSKAWLFFLVSTVAFGLLTYMIVGGTRANIIIAFAIFLFIGIIRGWISLWMLAAAGVLGIVGMFWLALKRYGLNVSGDEAFYTFLYLTRDTFSPWENLALLLQNYHNIDFQGLAPIVRDFYVFIPTWLWPGRPSIVLNSANYFTWEVLNNHSGLAISPTLIGSLVVMGGALFIPLGAIVVGLIIKWFDWLYELGNREPNRYKAAILHSFCFGAIFNMIVLAREGLDSFVSRVVFFLVVFGASLLVAKLLFWLFDSAGLIHKRTTSLPQAQVEGKL

SEQ ID NO: 1280 - protein, 96 aa, Mycobacterium bovis
MSQIMYNYPAMLGHAGDMAGYAGTLQSLGAEIAVEQAALQSAWQGDTGITYQAWQAQWNQAMEDLVRAYHAMSSTHEANTMAMMARDTAEAAKWGG

SEQ ID NO: 1281 - protein, 246 aa, Escherichia coli
MNNNTTAPTYTLRGLQLIGWRDMQHALDYLFADGQLKQGTLVAINAEKMLTIEDNAEVRELINAAEFKYADGISVVRSVRKKYPQAQVSRVAGADLWEELMARAGKEGTQVFLVGGKPEVLAQTEAKLRNQWNVNIVGSQDGYFKPEQRQALFERIHASGAQIVTVAMGAPKQEIFMRDCRLVHPDALYMGVGGTYDVFTGHVKRAPKIWQTLGLEWLYRLLSQPSRIKRQLRLLRYLRWHYTGNL

SEQ ID NO: 1282 - protein, 273 aa, Campylobacter jejuni
MKKFSLVAATLIAGVVLNVNAATVATVNGKSISDTEVSEFFAPMLRGQDFKTLPDNQKKALIQQYIMQDLILQDAKKQNLEKDPLYTKELDRAKDAILVNVYQEKILNTIKIDAAKVKAFYDQNKDKYVKPARVQAKHILVATEKEAKDIINELKGLKGKELDAKFSELAKEKSIDPGSKNQGGELGWFDQSTMVKPFTDAAFALKNGTITTTPVKTNFGYHVILKENSQAKGQIKFDEVKQGIENGLKFEEFKKVINQKGQDLLNSAKVEYK

SEQ ID NO: 1283 - protein, 388 aa, Bacillus anthracis
MIKNPKVLILTAHYGNGHVQVAKTLEQTFRQKGIKDVIVCDLFGESHPVITDITKYLYLKSYTIGKELYRLFYYGVEKIYDKKIASWYANFGRKRLKLLLQAEKPDIVINTFPIIAVPELKKQTGISIPVYNVLTDFCVHKIWIHREVDRYFVATDHVKKVMVDIGVPAEQIVETGIPIRSSFELKINPDIIYNKYQLCKNKKILLIVAGAHGVLGSVKELCQSFMSVPDLQVVVVCGKNEALKQDLVGVQETNPDALKVFGYVENIDELFRVTSCMITKPGGITLSEAAALQVPVILYKPVPGQENENAMYFERKGAAVVIRDDSEVFAKTEALLQDDMKLLQMKEAMKSIYRPEPADHIVDTILAENHVEPNHIPIKSPALAQSFT

SEQ ID NO: 1284 - protein, 1010 aa, Rickettsia parkeri
DTSEFDPLANKEYTEEQKQTLEQEQKEFLSQTTTPALEADDGFIVTSASFAQSTPSMSVLSGNISPSQTSDPITKAVRETIIQPQKDNLIEQILKDLAALTDRDLAEQKRKEIEEEKEKDKTLSTFFGNPANREFIDKALENPELKKKLESIEIAGYKNVHNTFSAASGYPGGFKPVQWENHVSASDLRATVVKNDAGDELCTLNETTVKTKPFTLAKQDGTQVQISSYREIDFPIKLDKADGSMHLSMVALKADGTKPSKDKPVYFTAHYEEGPNGKPQLKEISSPKPLKFAGTGDDAIAYIEHGGEIYTLAVTRGKYKDMMKEVELNQGQSVDLSQAEDIIIGQGQSKEQPLITPQQTTSSSVEPPQHKQQVPPITPTNQPLQPETSQMPQSQQVNPNLLNTATALSGSMQDLLNYVNAGLTKEIDSNKQIDLIKEAATAILNNEKSDIVEKQANIIALAENTVNNKNLKPDAKVAGVNAVLEIIKNDQNTPNLEKSKMLEATVAIVLNSENLEPKQKQQMLEKAVDVGLSLKDDASRAATIDGIKDVVIKSNLYTEDKGTMLIAVGDKVNVSELSNAEKQKLLGSVLKKGVEAQVLSPAQQQLMQQHLDKITAEQTKKDTIKKVNDILFDPLSNTELKTTNIQAITSNVLDGPATAEVKGEIIQEITNTVAGSSLEAQDKAEIVKGVGETIATHSDTSLSLPNKALIMASAEKGIAESKTNLPDRELMTKVLVDGIYEGKGGPEITKAVSSGIDNSNINDSEKEALKKAKDAASEAALDRDTQNLTEGFKGQNIEEHKPHDDIYNKAREVINAVNPVIEALEKSKEPVVSAEERIVQETSSILNNISKLAVEKVNNLRSMLSPNGNLKTLEEKKEESIKKVDELVKAFGTKSSTEEQQSFIKTNLIDDKTLSKEVRLQTIDKLLQEQKRAEAIENPSFKTEDVRVVSGKSKLKPISKDNPDIEKAKMVVGRDRVNIKGNIKIMGALMNARDIIQSENLNKSTPIKRE

SEQ ID NO: 1285 - protein, 179 aa, Escherichia coli
MNKSMLAGIGIGVAAALGVAAVASLNVFERGPQYAQVVSATPIKETVKTPRQECRNVTVTHRRPVQDENRITGSVLGAVAGGVIGHQFGGGRGKDVATVVGALGGGYAGNQIQGSLQESDTYTTTQQRCKTVYDKSEKMLGYDVTYKIGDQQGKIRMDRDPGTQIPLDSNGQLILNNKV

SEQ ID NO: 1286 - protein, 308 aa, Mycobacterium tuberculosis
MSPSMSIEALDQPVKPVVFRPLTLRRRIKNSVATTFFFTSFVVALIPLVWLLWVVIARGWFAVTRSGWWTHSLRGVLPEQFAGGVYHALYGTLVQAGVAAVLAVPLGLMTAVYLVEYGTGRMSRVTTFTVDVLAGVPSIVAALFVFSLWIATLGFQQSAFAVALALVLLMLPVVVRAGEEMLRLVPDELREASYALGVPKWKTIVRIVAPIAMPGIVSGILLSIARVVGETAPVLVLVGYSHSINLDVFHGNMASLPLLIYTELTNPEHAGFLRVWGAALTLIIVVATINLAAAMIRFVATRRRRLPL

SEQ ID NO: 1287 - protein, 376 aa, Escherichia coli
MIPFNAPPVVGTELDYMQSAMGSGKLCGDGGFTRRCQQWLEQRFGSAKVLLTPSCTASLEMAALLLDIQPGDEVIMPSYTFVSTANAFVLRGAKIVFVDVRPDTMNIDETLIEAAITDKTRVIVPVHYAGVACEMDTIMALAKKHNLFVVEDAAQGVMSTYKGRALGTIGHIGCFSFHETKNYTAGGEGGATLINDKALIERAEIIREKGTNRSQFFRGQVDKYTWRDIGSSYLMSDLQAAYLWAQLEAADRINQQRLALWQNYYDALAPLAKAGRIELPSIPDGCVQNAHMFYIKLRDIDDRSALINFLKEAEIMAVFHYIPLHGCPAGEHFGEFHGEDRYTTKESERLLRLPLFYNLSPVNQRTVIATLLNYFS

SEQ ID NO: 1288 - protein, 336 aa, Borrelia burgdorferi
MIINHNTSAINASRNNGINAANLSKTQEKLSSGYRINRASDDAAGMGVSGKINAQIRGLSQASRNTSKAINFIQTTEGNLNEVEKVLVRMKELAVQSGNGTYSDADRGSIQIEIEQLTDEINRIADQAQYNQMHMLSNKSASQNVRTAEELGMQPAKINTPASLSGSQASWTLRVHVGANQDEAIAVNIYAANVANLFSGEGAQTAQAAPVQEGVQQEGAQQPAPATAPSQGGVNSPVNVTTTVDANTSLAKIENAIRMISDQRANLGAFQNRLESIKDSTEYAIENLKASYAQIKDATMTDEVVAATTNSILTQSAMAMIAQANQVPQYVLSLLR

SEQ ID NO: 1289 - protein, 175 aa, Staphylococcus aureus
MNQTTKLCAATTLALGTLIGATVVGTASPIHQEAQAATTPYYTYHGYIGHNANFIMDKHFINAIKYDNVTFNGIKLAKTNATKKVEKYDQTFKGVTAKGNEANQLQFIVKNNISLKDIQKAYGKDLKKENNKTKESDSGIFYYQHSKKSLGIWFVVDHNRVVEVTVGHTPYKTSK

SEQ ID NO: 1290 - protein, 325 aa, Mycobacterium tuberculosis
MTDVSRKIRAWGRRLMIGTAAAVVLPGLVGLAGGAATAGAFSRPGLPVEYLQVPSPSMGRDIKVQFQSGGNNSPAVYLLDGLRAQDDYNGWDINTPAFEWYYQSGLSIVMPVGGQSSFYSDWYSPACGKAGCQTYKWETFLTSELPQWLSANRAVKPTGSAAIGLSMAGSSAMILAAYHPQQFIYAGSLSALLDPSQGMGPSLIGLAMGDAGGYKAADMWGPSSDPAWERNDPTQQIPKLVANNTRLWVYCGNGTPNELGGANIPAEFLENFVRSSNLKFQDAYNAAGGHNAVFNFPPNGTHSWEYWGAQLNAMKGDLQSSLGAG

SEQ ID NO: 1291 - protein, 143 aa, Mycobacterium tuberculosis
MTTARDIMNAGVTCVGEHETLTAAAQYMREHDIGALPICGDDDRLHGMLTDRDIVIKGLAAGLDPNTATAGELARDSIYYVDANASIQEMLNVMEEHQVRRVPVISEHRLVGIVTEADIARHLPEHAIVQFVKAICSPMALAS

SEQ ID NO: 1292 - protein, 255 aa, Staphylococcus aureus
MKKIVTATIATAGLATIAFAGHDAQAAEQNNNGYNSNDAQSYSYTYTIDAQGNYHYTWTGNWNPSQLTQNNTYYYNNYNTYSYNNASYNNYYNHSYQYNNYTNNSQTATNNYYTGGSGASYSTTSNNVHVTTTAAPSSNGRSISNGYASGSNLYTSGQCTYYVFDRVGGKIGSTWGNASNWANAAASSGYTVNNTPKVGAIMQTTQGYYGHVAYVEGVNSNGSVRVSEMNYGHGAGVVTSRTISANQAGSYNFIH

SEQ ID NO: 1293 - protein, 246 aa, Salmonella newport
MTNNAAAPLYSLRGLPLIGWRDMSHALNYLFADGQLKQGTLVAINAEKLLTAEDNPEVRALIAAAEFKYADGISVVRSIRKKFPQAQVSRVAGADLWEALMARAGKEGTPVFLVGGKPEVLAQTEAKLRTQWNVNIVGSQDGYFTPEQRQALFARIHASGAKIVTVAMGSPKQELLMRDCREVHPHALYMGVGGTYDVFTGHVKRAPKIWQNLGLEWLYRLLSQPRRITRQMRLLRYLRWHYTGDL

SEQ ID NO: 1294 - protein, 476 aa, Salmonella typhimurium
MDNIDNKYNPQLCKIFLAISDLIFFNLALWFSLGCVYFIFDQVQRFIPQDQLDTRVITHFILSVVCVGWFWIRLRHYTYRKPFWYELKEIFRTIVIFAIFDLALIAFTKWQFSRYVWVFCWTFALILVPFFRALTKHLLNKLGIWKKKTIILGSGQNARGAYSALQSEEMMGFDVIAFFDTDASDAEINMLPVIKDTEIIWDLNRTGDVHYILAYEYTELEKTHFWLRELSKHHCRSVTVVPSFRGLPLYNTDMSFIFSHEVMLLRIQNNLAKRSSRFLKRTFDIVCSIMILIIASPLMIYLWYKVTRDGGPAIYGHQRVGRHGKLFPCYKFRSMVMNSQEVLKELLANDPIARAEWEKDFKLKNDPRITAVGRFIRKTSLDELPQLFNVLKGDMSLVGPRPIVSDELERYCDDVDYYLMAKPGMTGLWQVSGRNDVDYDTRVYFDSWYVKNWTLWNDIAILFKTAKVVLRRDGAY

SEQ ID NO: 1295 - protein, 458 aa, Serratia proteamaculans
MTLAQFGGLFVVYLIGTLFVLTLTYQEFRRVRFNFNVFFSLLYLLTFYFGFPLTCLLVFQFDVEVVPVEFLLYAILSATAFYAIYYVSYKTRLRKRSVQPRKAVFSMNRVETHLTWILLALVAIVTVGIFFLQNGFLLFKLNSYSQIFSSDVSGVALKRFFYFFIPAMLVVYFLKQDLRAWFFFLAATVAFGILTYVIVGGTRANIIIAFSLFLFIGIVRGWISLWMLVAAGVFGIVGMFWLALKRYSLDVSGPEAFYTFLYLTRDTFSPWENLALLLQNYDKIDFQGLAPIVRDFYVFIPSWLWPGRPDTVLNTANYFTWEVLDNHSGLAISPTLIGSLVVMGGALFIPVGAVLVGMIIKWFDWLYEMGKSESNRYKAAILQGFCFGAVFNIIVLAREGVDSFVSRVVFFCLIFGVCLLMAKLLYWLFDTAGLIKARVQRSRTLTPPASSVRADGLL

SEQ ID NO: 1296 - protein, 94 aa, Mycobacterium tuberculosis
MTINYQFGDVDAHGAMIRAQAGSLEAEHQAIISDVLTASDFWGGAGSAACQGFITQLGRNFQVIYEQANAHGQKVQAAGNNMAQTDSAVGSSWA

SEQ ID NO: 1297 - protein, 359 aa, Salmonella enteritidis
MTVLIHVLGSDIPHHNHTVLRFFNDTLAATSEHAREFMVAGEDNGFTESCPALSLRFYGSKKALAQAVIAKAKANRRQRFFFHGQFNTSLWLALLSGGIKPAQFYWHIWGADLYEVSNGLKFRLFYPLRRIAQGRVGCVFATRGDLSYFARQHPNVRGELLYFPTRMDPSLNAMAKECQRAGKLTILVGNSGDRSNQHIAALRAVYQQFGDTVNVVVPMGYPANNQAYIDEVRQAGLALFSAENLQILSEKMEFDAYLALLRQCDLGYFIFARQQGIGTLCLLIQADIPCVLNRDNPFWQDMAEQHLPVLFTTDDLNEQVVREAQRQLASVDKSGITFFSPNYLQPWHNALRIAAGEAE

SEQ ID NO: 1298 - protein, 387 aa, Neisseria meningitidis
MRKKLTALVLSALPLAAVADVSLYGEIKAGVEGRNFQLQLTEPPSKSQPQVKVTKAKSRIRTKISDFGSFIGFKGSEDLGEGLKAVWQLEQDVSVAGGGATQWGNRESFVGLAGEFGTLRAGRVANQFDDASQAIDPWDSNNDVASQLGIFKRHDDMPVSVRYDSPDFSGFSGSVQFVPIQNSKSAYTPAHYTRQNNTDVFVPAVVGKPGSDVYYAGLNYKNGGFAGSYAFKYARHANVGRDAFELFLLGSTSDEAKGTDPLKNHQVHRLTGGYEEGGLNLALAAQLDLSENGDKAKTKNSTTEIAATASYRFGNAVPRISYAHGFDLIERGKKGENTSYDQIIAGVDYDFSKRTSAIVSGAWLKRNTGIGNYTQINAASVGLRHKF

SEQ ID NO: 1299 - protein, 388 aa, Bacillus cereus
MIKNPKVLILTAHYGNGHVQVAKTLEQTFRQKGIKDVIVCDLFGESHPVITDITKYLYLKSYTIGKELYRLFYYGVEKIYDKKIASWYANFGRKRLKLLLQAEKPDIVINTFPIIAVPELKKQTGISIPVYNVLTDFCVHKIWIHREVDRYFVATDHVKKVMVDIGVPAEQIVETGIPIRSSFELKINSDIIYNKYQLCKNKKILLIVAGAHGVLGSVKELCQSFMSVPDLQVVVVCGKNEALKQDLLGLQEKNPDALKVFGYVENIDELFRVTSCMITKPGGITLSEAAALQVPVILYKPVPGQENENAMYFERKGAAVVIRDDSEVFAKTEALLQDDMKLLQMKEAMKSIYRPEPADHIVDTILAENHVEPNHIPIKSPALAQSFT

SEQ ID NO: 1300 - protein, 242 aa, Xanthomonas campestris
MNQVARGAGAKRYADAKAALAGVVADGQTLAVGGFGLCGIPEALITALRDSAVSGLTVISNNAGVDGFGLGQLLATRQIRKMISSYVGENKEFERQYLAGELELEFNPQGTLAERLRAGGAGIPAFYTATGYGTIVADGKETREFDGKHYVLETALQADVALIKAWRADTAGNLVFRKTARNFNPACAMAGRICIAEVEEIVELGAIDPDQVHLPGIYVDRLVLNATPEKRIEQRTVRQGDK

SEQ ID NO: 1301 - protein, 179 aa, Shigella flexneri; identical to SEQ ID NO: 1285

SEQ ID NO: 1302 - protein, 374 aa, Mycobacterium tuberculosis; identical to SEQ ID NO: 1274

SEQ ID NO: 1303 - protein, 359 aa, Escherichia coli
MTVLIHVLGSDIPHHNRTVLRFFNDALAATSGHAREFMVAGKDDGLSDSCPALSVQFFPGKKSLAEAVIAKAKANRQQRFFFHGQFNPKLWLALLSGGIKPSQFFWHIWGADLYELSSGLRYKLFYPLRRLAQKRVGCVFATRGDLSFFAKTHPKVRGELLYFPTRMDPSLNTMANDRQREGKMTILVGNSGDRSNEHIAALRAVHQQFGDTVKVVVPMGYPPNNEAYIEEVRQAGLELFSEENLQVLSEKLEFDAYLTLLRQCDLGYFIFARQQGIGTLCLLIQAGIPCVLNRENPFWQDMTEQHLPVLFTTDDLNEDIVREAQRQLASVDKNTIAFFSPNYLQGWQRALAIAAGEVA

SEQ ID NO: 1304 - protein, 508 aa, Salmonella berta
MAQVINTNSLSLLTQNNLNKSQSSLSSAIERLSSGLRINSAKDDAAGQAIANRFTSNIKGLTQASRNANDGISIAQTTEGALNEINNNLQRVRELSVQATNGTNSDSDLKSIQDEIQQRLEEIDRVSNQTQFNGVKVLSQDNQMKIQVGANDGETITIDLQKIDVKSLGLDGFNVNGPKEATVGDLKSSFKNVTGYDTYAVGANKYRVDVNSGAVVTDTTAPTVPDKVYVNAANGQLTTDDAENNTAVDLFKTTKSTAGTAEAKAIAGAIKGGKEGDTFDYKGVTFTIDTKTGNDGNGKVSTTINGEKVTLTVADITAGAANVDAATLQSSKNVYTSVVNGQFTFDDKTKNESAKLSDLEANNAVKGESKITVNGAEYTANAAGDKVTLAGKTMFIDKTASGVSTLINEDAAAAKKSTANPLASIDSALSKVDAVRSSLGAIQNRFDSAITNLGNTVTNLNSARSRIEDADYATEVSNMSKAQILQQAGTSVLAQANQVPQNVLSLLR

SEQ ID NO: 1305 - protein, 175 aa, Staphylococcus aureus; identical to SEQ ID NO: 1257

SEQ ID NO: 1306 - protein, 325 aa, Mycobacterium tuberculosis
MHQVDPNLTRRKGRLAALAIAAMASASLVTVAVPATANADPEPAPPVPTTAASPPSTAAAPPAPATPVAPPPPAAANTPNAQPGDPNAAPPPADPNAPPPPVIAPNAPQPVRIDNPVGGFSFALPAGWVESDAAHFDYGSALLSKTTGDPPFPGQPPPVANDTRIVLGRLDQKLYASAEATDSKAAARLGSDMGEFYMPYPGTRINQETVSLDANGVSGSASYYEVKFSDPSKPNGQIWTGVIGSPAANAPDAGPPQRWFVVWLGTANNPVDKGAAKALAESIRPLVAPPPAPAPAPAEPAPAPAPAGEVAPTPTTPTPQRTLPA

SEQ ID NO: 1307 - protein, 254 aa, Leptospira borgpetersenii
MLRPRIIPVLLLQENGLVKTIQFGDERYIGDPLNAVRIFNEKEADELAVLDISASKKGKEPNYRLIERLANECRMPLCYGGGIKDLDQANRILSFGVEKIIVSSLAIENPKMISTMASYLGSQSVVVAIDFKKAMLSRRYEVMIHNGTKKTGKHLEDLVKEVIELGAGEIILNSIDRDGTMVGYEIEIIKKIQSICKIPITVLGGAGSLDHIKNLIQELGIIGVAAGSLFVYKGVHKAVLINYPNGTDKEALFP

SEQ ID NO: 1308 - protein, 255 aa, Staphylococcus aureus
MKKIVTATIATAGLATIAFAGHDAQAAEQNNNGYNSNDAQSYSYTYTIDAQGNYHYTWTGNWNPSQLTQNNTYYYNNYNTYSYNNASYNNYYNHSYQYNNYTNNSQTATNNYYTGGSGASYSTTSNNVHVTTTAAPSSNGRSISNGYASGSNLYTSGQCTYYVFDRVGGKIGSTWGNASNWASAAASSGYTVNNTPKAGAIMQTTQGYYGHVAYVEGVNSNGSVRVSEMNYGHGAGVVTSRTISANQAGSYNFIH

SEQ ID NO: 1309 - protein, 416 aa, Shigella flexneri
MSLAKASLWTAASTLVKIGAGLLVGKLLAVSFGPAGLGLAANFRQLITVLGVLAGAGIFNGVTKYVAQYHDNPQQLRRVVGTSSAMVLGFSTLMALVFVLAAAPISQGLFGNTDYQGLVRLVALVQMGIAWGNLLLALMKGFRDAAGNALSLIVGSLIGVLAYYVSYRLGGYEGALLGLALIPALVVIPAAIMLIKRGVIPLSYLKPSWDNGLAGQLSKFTLMALITSVTLPVAYIMMRKLLAAQYSWDEVGIWQGVSSISDAYLQFITASFSVYLLPTLSRLTEKRDITREVVKSLKFVLPAVAAASFTVWLLRDFAIWLLLSNKFTAMRDLFAWQLVGDVLKVGAYVFGYLVIAKASLRFYILAEVSQFTLLMVFAHWLIPAHGALGAAQAYMATYIVYFSLCCGVFLLWRRRA

SEQ ID NO: 1310 - protein, 415 aa, Escherichia coli
MNTNKLSLRRNVIYLAVVQGSNYLLPLLTFPYLVRTLGPENFGIFGFCQATMLYMIMFVEYGFNLTATQSIAKAADSKDKVTSIFWAVIFSKIVLIVITLIFLTSMTLLVPEYNKHAVIIWSFVPALVGNLIYPIWLFQGKEKMKWLTLSSILSRLAIIPLTFIFVNTKSDIAIAGFIQSSANLVAGIIALAIVVHEGWIGKVTLSLHNVRRSLADGFHVFISTSAISLYSTGIVIILGFISGPTSVGNFNAANTIRNALQGLLNPITQAIYPRISSTLVLNRVKGVILIKKSLTCLSLIGGAFSLILLLGASILVKISIGPGYDNAVIVLMIISPLPFLISLSNVYGIQVMLTHNYKKEFSKILIAAGLLSLLLIFPLTTLFKEIGAAITLLATECLVTSLMLMFVRNNKLLVC

SEQ ID NO: 1311 - protein, 450 aa, Shigella flexneri
MSLLQFSGLFVVWLLCTLFIATLTWFEFRRVRFNFNVFFSLLFLLTFFFGFPLTSVLVFRFDVGVAPPEILLQALLSAGCFYAVYYVTYKTRLRKRVADVPRRPLFTMNRVETNLTWVILMGIALVSVGIFFMHNGFLLFRLNSYSQIFSSEVSGVALKRFFYFFIPAMLVVYFLRQDSKAWLFFLVSTVAFGLLTYMIVGGTRANIIIAFAIFLFIGIIRGWISLWMLAAAGVLGIVGMFWLALKRYGMNVSGDEAFYTFLYLTRDTFSPWENLALLLQNYDNIDFQGLAPIVRDFYVFIPSWLWPGRPSMVLNSANYFTWEVLNNHSGLAISPTLIGSLVVMGGALFIPLGAIVVGLIIKWFDWLYELGNRETNRYKAAILHSFCFGAIFNMIVLAREGLDSFVSRVVFFIVVFGACLMIAKLLYWLFESAGLIHKRTKSSLRTQVEG

SEQ ID NO: 1312 - protein, 103 aa, Mycobacterium tuberculosis
MTENLTVQPERLGVLASHHDNAAVDASSGVEAAAGLGESVAITHGPYCSQFNDTLNVYLTAHNALGSSLHTAGVDLAKSLRIAAKIYSEADEAWRKAIDGLFT

SEQ ID NO: 1313 - protein, 246 aa, Klebsiella pneumoniae
MTGTISAPLYLLRGLQLIGWRDMQHALDYLYADGALREGTLVAINAEKMLAVEDNPEVRALIEAAEFKYADGISVVRSLRKKYPQAQVSRVAGADLWEALMQRAGAEGTPVFLVGGKPEVLTQTESRLRQRWQVNIVGSQDGYFTPEQRQTLFERIRDSGAKIVTVAMGSPRQEIFMRDCRRLYPHALYMGVGGTYDVFTGHVHRAPKFWQDLGLEWFYRLLLQPSRIKRQFRLLRYLRWHYTGKL

SEQ ID NO: 1314 - protein, 177 aa, Brucella abortus biovar
MGISKASLLSLAAAGIVLAGCQSSRLGNLDNVSPPPPPAPVNAVPAGTVQKGNLDSPTQFPNAPSTDMSAQSGTQVASLPPASAPDLTPGAVAGVWNASLGGQSCKIATPQTKYGQGYRAGPLRCPGELANLASWAVNGKQLVLYDANGGTVASLYSSGQGRFDGQTTGGQAVTLSR

SEQ ID NO: 1315 - protein, 388 aa, Bacillus cereus
MIKNPKVLILTAHYGNGHVQVAKTLEQTFRQKGIKDVIVCDLFGESHPVITDITKYLYLKSYTIGKELYRLFYYGVEKIYDKKIASWYANFGRKRLKLLLQAEKPDIVINTFPIIAVPELKKQTGISIPVYNVLTDFCVHKIWIHREVDRYFVATDHVKKVMVDIGVPAEQIVETGIPIRSSFELKINPDIIYNKYQLCKNKKILLIVAGAHGVLGSVKELCQSFMSVPDLQVVVVCGKNEALKQDLVGVQETNPDALKVFGYVENIDELFRVTSCMITKPGGITLSEAAALQVPVILYKPVPGQENENAMYFERKGAAVVIRDDSEVFAKTEALLKDDMKLLQMKEAMKSIYRPEPADHIVDTILAENHVEPNHIPIKSPALAQSFT

SEQ ID NO: 1316 - protein, 287 aa, Treponema pallidum
MIRRRYRGCTQGAWIVSVGMLFASCTSGAWKASVDPLGVVGSGADVYLYFPVAGNENLISRIIENHESKADIKKIVDRTTAVYGAFFARSKEFRLFGSGSYPYAFTNLIFSRSDGWASTKTEHGITYYESEHTDVSIPAPHFSCVIFGSSKRERMSKMLSRLVNPDRPQLPPRFEKECTSEGTSQTVALYIKNGGHFITKLLNFPQLNLPLGAMELYLTARRNEYLYTLSLQLGNAKINFPIQFLISRVLNAHIHVEGDRLIIEDGTISAERLASVISSLYSKKGSS

SEQ ID NO: 1317 - protein, 224 aa, Escherichia coli
MKILYSFLLLPFFSCAFSVDSMIKFSGEDDFFLVNGNSKEREYIYVTLSELISEKNNRRDEIFYNADNVPLWPISAEPADIIISSGEQVKIKINKNYTPVGGDRIFGINFSPDTLNDNDRNQYNIPFGYKAWLIVPGTESESGTVDVSKVSEKNKYIIKNNTNKVMDVWADYCGSYNNNKCRVQLITRPYSEKKIEIDSNNNPIEFTFSIYIGRERKLIKRKIL

SEQ ID NO: 1318 - protein, 259 aa, Campylobacter jejuni
MVFRKSLLKLAVFALGACVAFSNANAAEGKLESIKSKGQLIVGVKNDVPHYALLDQATGEIKGFEVDVAKLLAKSILGDDKKIKLVAVNAKTRGPLLDNGSVDAVIATFTITPERKRIYNFSEPYYQDAIGLLVLKEKKYKSLADMKGANIGVAQAATTKKAIGEAAKKIGIDVKFSEFPDYPSIKAALDAKRVDAFSVDKSILLGYVDDKSEILPDSFEPQSYGIVTKKDDPAFAKYVDDFVKEHKNEIDALAKKWGL

SEQ ID NO: 1319 - protein, 361 aa, Yersinia pestis
MITLTHVLGSDIPHHNLTVLRFFNDVLAKCLPVEQVRHFMVAAKETAPFSSFPQLDINTYSDKKALAEAVIARAQADRSARFFWHGQFNVTLWLALLSGKIKPGQVYWHVWGADLYEDAKSLKFRLFYLLRRIAQGRVGHVFATRGDLIHYQQRHPRVPASLLYFPTRMDPALTAINIDKPLAGPMTILVGNSGDTTNRHIEALKAIHQQFGPDVRVIIPMGYPANNEAYIEQVRQAGLALFSQDNLRILTEQIPFDDYLNILRECDLGYFIFNRQQGIGTLCLLTQFGVPFVLSRKNPFWQDLAEQHIPVFFYGDTLDEPMIREAQRQLAGLDKQAIAFFNPNYIEGWKQALALAAGEHP

SEQ ID NO: 1320 - protein, 505 aa, Salmonella derby
MAQVINTNSLSLLTQNNLNKSQSSLSSAIERLSSGLRINSAKDDAAGQAIANRFTSNIKGLTQASRNANDGISIAQTTEGALNEINNNLQRVRELSVQATNGTNSDSDLKSIQDEIQQRLEEIDRVSNQTQFNGVKVLSQDNQMKIQVGANDGETITIDLQKIDVKSLGLDGFNVNGPKEATVGDLKSSFKNVTGYDTYAAGADKYRVDINSGAVVTDAVAPNKVYVNAANGQLTTDDAENNTAVDLFKTTKSTAGTAEAKAIAGAIKGGKEGDTFDYKGVTFTIDTKTGNDGNGKVSTTINGEKVTLTVADITGGAANVDAATLQSSKNVYTSVVNGQFTFDDKTKNESAKLSDLEANNAVKGESKITVNGAEYTANATGDKVTLAGKTMFIDKTASGVSTLINEDAAAAKKSTANPLASIDSALSKVDAVRSSLGAIQNRFDSAITNLGNTVTNLNSARSRIEDADYATEVSNMSKAQILQQAGTSVLAQANQVPQNVLSLLR

SEQ ID NO: 1321 - protein, 545 aa, Shigella boydii
MLPINNNFSLPQNSFYNTISGTYADYFSAWDKWEKQALPGEERDEAVSRLKECLINNSDELRLDRLNLSSLPDNLPAQITLLNVSYNQLTNLPELPVTLKKLYSASNKLSELPVLPPALESLQVQHNELENLPALPDSLLTMNISYNEIVSLPSLPLALKNLRATRNFLTELPAFSEGNNPVVREYFFDRNQISHIPESILNLRNECSIHISDNPLSSHALQALQRLTSSPDYHGPRIYFSMSDGQQNTLHRPLADAVTAWFPENKQSDVSQIWHAFEHEEHANTFSAFLDRLSDTVSARNTSGFREQVAAWLEKLSASAELRQQSFAVAADATESCEDRVALTWNNLRKTLLVHQASEGLFDNDTGALLSLGREMFRLEILEDIARDKVRTLHFVDEIEVYLAFQTMLAEKLQLSTAVKEMRFYGVSGVTANDLRTAEAMVRSREENEFTDWFSLWGPWHAVLKRTEADRWALAEEQKYEMLENEYPQRVADRLKASGLSGDADAEREAGAQVMRETEQQIYRQLTDEVLALRLSENGSQLHHS

SEQ ID NO: 1322 - protein, 144 aa, Mycobacterium tuberculosis
MATTLPVQRHPRSLFPEFSELFAAFPSFAGLRPTFDTRLMRLEDEMKEGRYEVRAELPGVDPDKDVDIMVRDGQLTIKAERTEQKDFDGRSEFAYGSFVRTVSLPVGADEDDIKATYDKGILTVSVAVSEGKPTEKHIQIRSTN

SEQ ID NO: 1323 - protein, 258 aa, Escherichia coli
MLAKRIIPCLDVRDGQVVKGVQFRNHEIIGDIVPLAKRYAEEGADELVFYDITASSDGRVVDKSWVSRVAEVIDIPFCVAGGIKSLEDAAKILSFGADKISINSPALADPTLITRLADRFGVQCIVVGIDTWYDAETGKYHVNQYTGDESRTRVTQWETLDWVQEVQKRGAGEIVLNMMNQDGVRNGYDLEQLKKVREVCHVPLIASGGAGTMEHFLEAFRDADVDGALAASVFHKQIINIGELKAYLATQGVEIRIC

SEQ ID NO: 1324 - protein, 255 aa, Staphylococcus aureus; identical to SEQ ID NO: 1292

SEQ ID NO: 1325 - protein, 450 aa, Escherichia coli
MSLLQFSGLFVVWLLCTLFIATLTWFEFRRMRFNFNVFFSLLFLLTFFFGFPLTSVLVFRFDVGVAPPEILLQALLSAGCFYAVYYVTYKTRLRKRVADVPRRPLFTMNRVETNLTWVILMGIALVSVGIFFMHNGFLLFRLNSYSQIFSSEVSGVALKRFFYFFIPAMLVVYFLRQDSKAWLFFLVSTVAFGLLTYMIVGGTRANIIIAFAIFLFIGIIRGWISLWMLAAAGVLGIVGMFWLALKRYGMNVSGDEAFYTFLYLTRDTFSPWENLALLLQNYDNIDFQGLAPIVRDFYVFIPSWLWPGRPSMVLNSANYFTWEVLNNHSGLAISPTLIGSLVVMGGALFIPLGAIVVGLIIKWFDWLYELGNRETNRYKAAILHSFCFGAIFNMIVLAREGLDSFVSRVVFFIVVFGACLMIAKLLYWLFESAGLIHKRTKSSLRTQVEG

SEQ ID NO: 1326 - protein, 465 aa, Vibrio cholerae
MFIPVIMAGGSGSRLWPLSRSAFPKQFLSLDSSSQHTMLQATIERLQGLPIAEPIVISNEDHRFIVAEQIRRYGKKSRIILEPAGRNTAPAIALAAFTAIEQEDDPVLLVLAADHFVKNKSAFQAAISQAAQQAEAGKLATFGIVPTTPETGYGYIHRGEEVTQGTYEINSFVEKPQLNIAEQYLASGEYYWNSGCFMFKASVFLNELKQHSPEIYRQCELAMQGLSHDYDFIRVGVEEFLKCPDDSIDYAVMEHTKLGVVVSMDAGWSDVGSWSALWEVSDKDADGNVCQGDAILSGTSNCYIYAPNKLVAAVGLKDIVVVETKDAVLVADKNQVQEVKKIVEHLKAENRAEYREHRERYRPWGKSDAIDKGERYKVNRITVEPGKKQSLQMHYHRAEHWVVVSGTAKVTCEGNVKVITENQSLYIPIGTNHMIENPGKIPLELIEIQSGSYLNEDDVVRFEDK

SEQ ID NO: 1327 - protein, 197 aa, Mycobacterium tuberculosis
MFLYVAVGSLVVARLLLYPLRPADLTPPYWVAMGATAITVLAGAHIVEMADAPMAIVTSGLVAGASVVFWAFGPWLIPPLVAASIWKHVVHRVPLRYEATLWSVVFPLGMYGVGAYRLGLAAHLPIVESIGEFEGWVALAVWTITFVAMLHHLAATIGRSGRSSHAIGAADDTHAIICRPPRSFDHQVRAFRRNQPM

SEQ ID NO: 1328 - protein, 100 aa, Mycobacterium tuberculosis
MAEMKTDAATLAQEAGNFERISGDLKTQIDQVESTAGSLQGQWRGAAGTAAQAAVVRFQEAANKQKQELDEISTNIRQAGVQYSRADEEQQQALSSQMGF

SEQ ID NO: 1329 - protein, 376 aa, Escherichia coli
MKVLTVFGTRPEAIKMAPLVHALAKDPFFEAKVCVTAQHREMLDQVLKLFSIVPDYDLNIMQPGQGLTEITCRILEGLKPILAEFKPDVVLVHGDTTTTLATSLAAFYQRIPVGHVEAGLRTGDLYSPWPEEANRTLTGHLAMYHFSPTETSRQNLLRENVADSRIFITGNTVIDALLWVRDQVMSSDKLRSELAANYPFIDPDKKMILVTGHRRESFGRGFEEICHALADIATTHQDIQIVYPVHLNPNVREPVNRILGHVKNVILIDPQEYLPFVWLMNHAWLILTDSGGIQEEAPSLGKPVLVMRDTTERPEAVTAGTVRLVGTDKQRIVEEVTRLLKDENEYQAMSRAHNPYGDGQACSRILEALKNNRISL

SEQ ID NO: 1330 - protein, 177 aa, Brucella melitensis; identical to SEQ ID NO: 1314

SEQ ID NO: 1331 - protein, 391 aa, Staphylococcus aureus
MVTQNKKILIITGSFGNGHMQVTQSIVNQLNDMNLDHLSVIEHDLFMEAHPILTSICKKWYINSFKYFRNMYKGFYYSRPDKLDKCFYKYYGLNKLINLLIKEKPDLILLTFPTPVMSVLTEQFNINIPVATVMTDYRLHKNWITPYSTRYYVATKETKQDFIDVGIDPSTVKVTGIPIDNKFETPINQKQWLIDNNLDPDKQTILMSAGAFGVSKGFDTMITDILAKSANAQVVMICGKSKELKRSLIAKFKSNENVLILGYTKHMNEWMASSQLMITKPGGITITEGFARCIPMIFLNPAPGQELENALYFEEKGFGKIADTPEEAIKIVASLTNGNEQLTNMISTMEQDKIKYATQTICRDLLDLIGHSSQPQEIYGKVPLYARFFVK

SEQ ID NO: 1332 - protein, 831 aa, Salmonella typhi
MNLMKSSGMFTLTAIGSCRIVSPVKRAQPYFNFQANFKRIYGFTHTSSEALQQIRFILGLIDIPEKVRPFIFRPNVNYSNTDVHSRSDFYIIEISSQKKIMAYGFCLQINYLTRHFYEFFSQTERACMYWSLATQGNRHKLLAYLKDDPCFAGMSEDDRALLSNINVEQMDEHAIEQDMMEIVQLLGRDRVMFMTHVDAVTRAGTVILSRSRLIKNVDTIAARMDIPCVNPTNLMEKWGQKRALEKNGDDLTHYTDMFGDAIVAAIFKGVINNTNHHLDEGRQEKQDQIREITLSITKQLADGDIIAASQQLFAALRNQQQDPVLIQLRSVIFSHLGYYEQAYQDISDVEKIIGTTDSTLRCRLRSLHGLARWREALSTAEMMLSNEIEDEEVLTVAAGSADALQLFDKSYHYWKRVLLLNPETQSGWVNFLSSTQYFNDGNAFSEAFHAGIQSQRLNDTFMETALSLAIKFSDELIFMHALEQLLRHESEFALTVLSTIHDTGLVIRTAFCIKNMSYHQALRTSYKDKIHDVFEAWNNTALSLHSVDDFVSLSTSLAYSYSAFMVYPHSRISRFNNEVKMAWRDKLREMYEREDYENILAGAKIVWPLLKFDPVGTVYCARTLVNLGAWKDACTLAHMTLIRNSNITSLQSIMLRSIRHINNIPFLIDLIANVMSITLSFQNASMNKLFEKECRNVATRALKYVRQKKTEGRLDEALSVLISLKRIEPDVSRLMREYKQIIRLFNESRKDGGSTITSYEHLDYAKKLLVFDSENAYALKYAALNAMHLRDYTQALQYWQRLEKVNGPTEPVTRQISTCITALQKNTSGKS

SEQ ID NO: 1333 - protein, 355 aa, Salmonella typhi
MKKIIILLTTFFLLSGCTIPRAVFKSSLINQDDPRYNLVEVTPTLKLSAPDTVPKTIVDPVFAANNWHWTSLAKGDVLHITILSSGGAGYLSNNASGDRADFENILVTDSNTVQVPYAGTIPVSGLDVTQLADEIKKRLSRVVLNPQVIVTLTARTGAMVTVEGSGKTGRYPLEQSMNRLSHLLATAVAVENTSTDMMEVHVTRQQHYFTARLSDIYQYPGLDIALQPDDRITLRQVTEYVNVLGAAGVQGKHALVQRHSSVVDALALAKGLNDNLADPQAIFLYKHNEAEQAKQQMRKLNIYHVDMSQPNSVFLAQAIRVDNGDVIYISNASLTDFAKVKAAFDSFLTRGTNSF

SEQ ID NO: 1334 - protein, 259 aa, Campylobacter jejuni
MVFRKSLLKLAVFALGACVAFSNANAAEGKLESIKSKGQLIVGVKNDVPHYALLDQATGEIKGFEVDVAKLLAKSILGDDKKIKLVAVNAKTRGPLLDNGSVDAVIATFTITPERKRIYNFSEPYYQDAIGLLVLKEKNYKSLADMKGANIGVAQAATTKKAIGEAAKKIGIDVKFSEFPDYPSIKAALDAKRVDAFSVDKSILLGYVDDKSEILPDSFEPQSYGIVTKKDDPAFAKYVDDFVKEHKNEIDALAKKWGL

SEQ ID NO: 1335 - protein, 361 aa, Yersinia pestis
MITLTHVLGSDIPHHNLTVLRFFNDVLAKCLPVEQVRHFMVAAKETAPFSSFPQLDINTYSDKKALAEAVIARAQADRSARFFWHGQFNATLWLALLSGKIKPGQVYWHVWGADLYEDAKSLKFRLFYLLRRIAQGRGGHVFATRGDLIHYQQRHPRVPASLLYFPTRMDPALTAINIDKPLAGPMTILVGNSGDTTNRHIEALKAIHQQFGPDVRVIIPMGYPANNEAYIEQVRQAGLALFSQDNLRILTEQIPFDDYLNILRECDLGYFIFNRQQGIGTLCLLTQFGVPFVLSRKNPFWQDLAEQHIPVFFYGDTLDEPMIREAQRQLAGLDKQAIAFFNPNYIEGWKQALALAAGEHP

SEQ ID NO: 1336 - protein, 505 aa, Salmonella rostock
MAQVINTNSLSLLTQNNLNKSQSSLSSAIERLSSGLRINSAKDDAAGQAIANRFTSNIKGLTQASRNANDGISIAQTTEGALNEINNNLQRVRELSVQATNGTNSDSDLKSIQDEIQQRLEEIDRVSNQTQFNGVKVLSQDNQMKIQVGANDGETITIDLQKIDVKSLGLDGFNVNGPKEATVGDLKSSFKNVTGYDTYAAGADKYRVDINSGAVVTDAVAPDKVYVNAANGQLTTDDAENNTAVDLFKTTKSTAGTAEAKAIAGAIKGGKEGDTFDYKGVTFTIDTKTGDDGNGKVSTTINGEKVTLTVADIGIGAADVNAATLQSSKNVYTSVVNGQFTFDDKTKNESAKLSDLEANNAVKGESKITVNGAEYTANATGDKITLAGKTMFIDKTASGVSTLINEDAAAAKKSTANPLASIDSALSKVDAVRSSLGAIQNRFDSAITNLGNTVTNLNSARSRIEDADYATEVSNMSKAQILQQAGTSVLAQANQVPQNVLSLLR

SEQ ID NO: 1337 - protein, 545 aa, Shigella sonnei
MLPINNNFSLPQNSFYNTISGTYADYFSAWDKWEKQALPGEERDEAVSRLKECLINNSDELRLDRLNLSSLPDNLPAQITLLNVSYNQLTNLPELPVTLKKLYSASNKLSELPVLPPALESLQVQHNELENLPALPDSLLTMNISYNEIVSLPSLPQALKNLRATRNFLTELPAFSEGNNPVVREYFFDRNQISHIPESILNLRNECSIHISDNPLSSHALQALQRLTSSPDYHGPRIYFSMSDGQQNTLHRPLADAVTAWFPENKQSDVSQIWHAFEHEEHANTFSAFLDRLSDTVSARNTSGFREQVAAWLEKLSASAELRQQSFAVAADATESCEDRVALTWNNLRKTLLVHQASEGLFDNDTGALLSLGREMFRLEILEDIARDKVRTLHFVDEIEVYLAFQTMLAEKLQLSTAVKEMRFYGVSGVTANDLRTAEAMVRSREENEFTDWFSLWGPWHAVLKRTEADRWAQAEEQKYEMLENEYSQRVADRLKASGLSGDADAEREAGAQVMRETEQQIYRQLTDEVLALRLSENGSQLHHS

SEQ ID NO: 1338 - protein, 540 aa, Mycobacterium tuberculosis
MAKTIAYDEEARRGLERGLNALADAVKVTLGPKGRNVVLEKKWGAPTITNDGVSIAKEIELEDPYEKIGAELVKEVAKKTDDVAGDGTTTATVLAQALVREGLRNVAAGANPLGLKRGIEKAVEKVTETLLKGAKEVETKEQIAATAAISAGDQSIGDLIAEAMDKVGNEGVITVEESNTFGLQLELTEGMRFDKGYISGYFVTDPERQEAVLEDPYILLVSSKVSTVKDLLPLLEKVIGAGKPLLIIAEDVEGEALSTLVVNKIRGTFKSVAVKAPGFGDRRKAMLQDMAILTGGQVISEEVGLTLENADLSLLGKARKVVVTKDETTIVEGAGDTDAIAGRVAQIRQEIENSDSDYDREKLQERLAKLAGGVAVIKAGAATEVELKERKHRIEDAVRNAKAAVEEGIVAGGGVTLLQAAPTLDELKLEGDEATGANIVKVALEAPLKQIAFNSGLEPGVVAEKVRNLPAGHGLNAQTGVYEDLLAAGVADPVKVTRSALQNAASIAGLFLTTEAVVADKPEKEKASVPGGGDMGGMDF

SEQ ID NO: 1339 - protein, 287 aa, Staphylococcus saprophyticus
MKIKKAIIPAAGLGTRFLPATKAMPKEMLPILDKPTIQYIVEEAVAAGIEDIIIVTGKHKRAIEDHFDNQKELEMILEEKGKSDLLQSVKYSSNLANMFYVRQKEQKGLGHAIWTARQFIGNEPFAVLLGDDIVQADTPAIKQLMNQYETTGKSIIGVQQVNEIETHRYGIVDPEESYNELFSVNKFVEKPEIGTAPSNLAIMGRYVLKPDIFDYLERQEIGRGGEIQLTDAIEHLNSEDCVYAYNFEGERYDVGEKIGFVKTTIQFALKDDYMKKEITEFIKSINK

SEQ ID NO: 1340 - protein, 255 aa, Staphylococcus aureus; identical to SEQ ID NO: 1292

SEQ ID NO: 1341 - protein, 450 aa, Escherichia coli; identical to SEQ ID NO: 1311

SEQ ID NO: 1342 - protein, 246 aa, Klebsiella pneumoniae
MHPVINFSHVTKEYPLYHHIGSGIKDLIFHPKRAFQLLKGRKYLAIEDVSFTVGKGEAVALIGRNGAGKSTSLGLVAGVIKPTKGTVTTEGRVASMLELGGGFHPELTGRENIYLNATLLGLRRKEVQQRMERIIEFSELGEFIDEPIRVYSSGMLAKLGFSVISQVEPDILIIDEVLAVGDIAFQAKCIQTIRDFKKRGVTILFVSHNMSDVEKICDRVIWIENHRLREVGSAERIIELYKQAMA

SEQ ID NO: 1343 - protein, 204 aa, Treponema pallidum
MKRVSLLGSAAIFALVFSACGGGGEHQHGEEMMAAVPAPDAEGAAGFDEFPIGEDRDVGPLHVGGVYFQPVEMHPAPGAQPSKEEADCHIEADIHANEAGKDLGYGVGDFVPYLRVVAFLQKHGSEKVQKVMFAPMNAGDGPHYGANVKFEEGLGTYKVRFEIAAPSHDEYSLHIDEQTGVSGRFWSEPLVAEWDDFEWKGPQW

SEQ ID NO: 1344 - protein, 793 aa, Haemophilus influenzae
MKKLLIASLLFGTTTTVFAAPFVAKDIRVDGVQGDLEQQIRASLPVRAGQRVTDNDVANIVRSLFVSGRFDDVKAHQEGDVLVVSVVAKSIISDVKIKGNSVIPTEALKQNLDANGFKVGDVLIREKLNEFAKSVKEHYASVGRYNATVEPIVNTLPNNRAEILIQINEDDKAKLASLTFKGNESVSSSTLQEQMELQPDSWWKLWGNKFEGAQFEKDLQAIRDYYLNNGYAKAQITKTDVQLNDEKTKVNVTIDVNEGLQYDLRSARIIGNLGGMSAELEPLLSALHLNDTFRRSDIADVENAIKAKLGERGYGNTTVNSVPDFDDANKTLAITFVVDAGRRLTVRQLRFEGNTVSADSTLRQEMRQQEGTWYNSQLVELGKIRLDRTGFFETVENRIDPINGSNDEVDVVYKVKERNTGSINFGIGYGTESGISYQTSIKQDNFLGTGAAVSIAGTKNDYGTSVNLGYTEPYFTKDGVSLGGNIFFENYDNSKSDTSSNYKRTTYGSNVTLGFPVNENNSYYVGLGHTYNKISNFALEYNRNLYIQSMKFKGNGIKTNDFDFSFGWNYNSLNRGYFPTKGVKASLGGRVTIPGSDNKYYKLSADVQGFYPLDRDHRWVVSAKASAGYANGFGNKRLPFYQTYTAGGIGSLRGFAYGSIGPNAIYAEHGNGTFNKISSDVIGGNAITTASAELIVPTPFVSDKSQNTVRTSLFVDAASVWNTKWKSDKNGLESKVLKDLPDYGKSSRIRASTGVGFQWQSPIGPLVFSYAKPIKKYENDDVEQFQFSIGGSF

SEQ ID NO: 1345 - protein, 359 aa, Salmonella paratyphi
MTVLIHVLGSDIPHHNHTVLRFFNDTLAATSEHAREFMVAGEDNGFTESCPALSLRFYGSKKALAQAVIAKAKANRRQRFFFHGQFNTSLWLALLSGGIKPAQFYWHIWGADLYEVSNGLKFRLFYPLRRIAQGRVGGVFATRGDLSYFARQHPGVRGELLYFPTRMDPSLNAMAKERQRAGKLTILVGNSGDRSNQHIAALRAVYQQFGDTVNVVVPMGYPANNQAYIDEVRQAGLALFSAENLQILSEKMEFDAYLALLRQCDLGYFIFARQQGIGTLCLLIQADIPCVLNRDNPFWQDMAEQHLPVLFTTDDLNEQVVREAQRQLASVDKSGITFFSPNYLQPWHNALRIAAGEAE

SEQ ID NO: 1346 - protein, 177 aa, Brucella suis biovar; identical to SEQ ID NO: 1314

SEQ ID NO: 1347 - protein, 391 aa, Staphylococcus aureus
MVTQNKKILIITGSFGNGHMQVTQSIVNQLNDMNLDHLSVIEHDLFMEAHPILTSICKKWYINSFKYFRNMYKGFYYSRPDKLDKCFYKYYGLNKLINLLIKEKPDLILLTFPTPVMSVLTEQFNINIPVATVMTDYRLHKNWITPYSTRYYVATKETKQDFIDVGIDPSTVKVTGIPIDNKFETPINQKQWLIDNNLDPDKQTILMSAGAFGVSKGFDTMITDILAKSANAQVVMICGKSKELKRSLTAKFKSNENVLILGYTKHMNEWMASSQLMITKPGGITITEGFARCIPMIFLNPAPGQELENALYFEEKGFGKIADTPEEAIKIVASLTNGNEQLTNMISTMEQDKIKYATQTICRDLLDLIGHSSQPQEIYGKVPLYARFFVK

SEQ ID NO: 1348 - protein, 270 aa, Aggregatibacter actinomycetemcomitans
MNIIITGANGYIGRYVVKELLNKGHKVIAILFDGESPHSFLSGAELFYGDIFALSQEKKVDLVQNAECLLHLAWQAGFNHRDPSHLNNVMKHYQFLTSMAELGIKNISVAGTMHEVGYFVGPIDANTPCNPRNPYGIAKNFLRQAMFDFASVTPELNLRWLRFYYITGDDRFNNSIFTKILKAEDEVQEYFPLNSGEMLYDFVDIKDLSLQIEERIISKESGIFNCCSGKPKSLRTAVEEFIAEHNLKIKPKYNVFPARSYDSMAVWGAK

SEQ ID NO: 1349 - protein, 297 aa, Bacillus subtilis
MRKKVRKAVIPAAGLGTRFLPATKAQPKEMLPIVDKPAIQYIVEEAAESGIEDILIITGRNKRSIEDHFDRSAELEFNLREKGKTETLKEMQQIADLANIHYIRQKEPLGLGHAVLCAEHFIGDEPFAVLLGDDIMVSETPALRQLMDVYDVYGTEVVGVQSVLPEDVSKYGIINTSGSQGHVYEVNDLVEKPSPEEAPSEIAVMGRYVLNSSIFSVLKTIGRGAGNEIQLTDALREVCRKEPIHARLLEGNRYDIGDKLGCFKASTEIGLMRPEMRSQLLAYLEDVIKRETKEMLR

SEQ ID NO: 1350 - protein, 548 aa, Acinetobacter baylyi
MNSIFKKIKNYTIVSGVFFLGSAFIIPNTSNLSSTLYKELIAVLGLLILLTVKSFDYKKILIPKNFYWFLFVIFIIFIQLIVGEIYFFQDFFFSISFLVILFLSFLLGFNERLNGDDLIVKKIAWIFIIVVQISFLIAINQKIEIVQNFFLFSSSYNGRSTANLGQPNQFSTLILITLFLLCYLREKNSLNNMVFNILSFCLIFANVMTQSRSAWISVILISLLYLLKFQKKIELRRVIFFNIVFWTLVYCVPLLFNLIFFQKNSYSTFDRLTMGSSRFEIWPQLLKAVFHKPFIGYGWGQTGVAQLETINKSSTKGEWFTYSHNLFLDLMLWNGFFIGLIISILILCFLIELYSSIKNKSDLFLFFCVVAFFVHCLLEYPFAYTYFLIPVGFLCGYISTQNIKNSISYFNLSKRKLTLFLGCCWLGYVAFWVEVLDISKKNEIYARQFLFSNHVKFYNIENYILDGFSKQLDFQYLDYCELKDKYQLLDFKKVAYRYPNASIVYKYYSISAEMKMDQKSANQIIRAYSVIKNQKIIKPKLKFCSIEY

SEQ ID NO: 1351 - protein, 246 aa, Salmonella paratyphi
MTNNAAAPLYSLRGLPLIGWRDMSHALNYLFADGQLKQGTLVAINAEKLLTAEDNPEVRALIGAAEFKYADGISVVRSIRKKFPQAQVSRVAGADLWEALMARAGKEGTPVFLVGGKPEVLAQTEAKLRTQWNVNIVGSQDGYFTPEQRQALFARIHASGAKIVTVAMGSPKQELLMRDCREVHPHALYMGVGGTYDVFTGHVKRAPKIWQNLGLEWLYRLLSQPKRITRQMRLLRYLRWHYTGDL

SEQ ID NO: 1352 - protein, 505 aa, Salmonella senftenberg
MAQVINTNSLSLLTQNNLNKSQSSLSSAIERLSSGLRINSAKDDAAGQAIANRFTSNIKGLTQASRNANDGISIAQTTEGALNEINNNLQRVRELSVQATNGTNSDSDLKSIQDEIQQRLEEIDRVSNQTQFNGVKVLSQDNQMKIQVGANDGETITIDLQKIDVKSLGLDGFNVNGPKEATVGDLKSSFKNVTGYDTYAAGADKYRVDINSGAVVTDDAAPDKVYVNAANGQLTTDDAENNTAVNLFKTTKSTAGTDEAKAIASAIKGGKEGDTFDYKGVSFTIDTKAGNDGNGTVSTTINGEKVTLTVADITAGAANVNDATLQSSKNVYTSVVNGQFTFDDKTKNESAKLSDLEANNAVKGESKITVNGAEYTANAAGDKVTLAGKTMFIDKTASGVSTLINEDAAAAKKSTANPLASIDSALSKVDAVRSSLGAIQNRFDSAITNLGNTVTNLNSARSRIEDADYATEVSNMSKAQILQQAGTSVLAQANQVPQNVLSLLR

SEQ ID NO: 1353 - protein, 363 aa, Shigella flexneri
MEIQNTKPTQTLYTDISTKQTQSSSETQKSQNYQQIAAHIPLNVGKNPVLTTTLNDDQLLKLSEQVQHDSEIIARLTDKKMKDLSEMSHTLTPENTLDISSLSSNAVSLIISVAVLLSALRTAETKLGSQLSLIAFDATKSAAENIVRQGLAALSSSITGAVTQVGITGIGAKKTHSGISDQKGALRKNLATAQSLEKELAGSKLGLNKQIDTNITSPQTNSSTKFLGKNKLAPDNISLSTEHKTSLSSPDISLQDKIDTQRRTYELNTLSAQQKQNIGRATMETSAVAGNISTSGGRYASALEEEEQLISQASSKQAEEASQVSKEASQATNQLIQKLLNIIDSINQSKNSAASQIAGNIRA

SEQ ID NO: 1354 - protein, 159 aa, Mycobacterium tuberculosis
MKRGLTVAVAGAAILVAGLSGCSSNKSTTGSGETTTAAGTTASPGAASGPKVVIDGKDQNVTGSVVCTTAAGNVNIAIGGAATGIAAVLTDGNPPEVKSVGLGNVNGVTLGYTSGTGQGNASATKDGSHYKITGTATGVDMANPMSPVNKSFEIEVTCS

SEQ ID NO: 1355 - protein, 292 aa, Bacillus subtilis
MKKVRKAIIPAAGLGTRFLPATKAMPKEMLPIVDKPTIQYIIEEAVEAGIEDIIIVTGKSKRAIEDHFDYSPELERNLEEKGKTELLEKVKKASNLADIHYIRQKEPKGLGHAVWCARNFIGDEPFAVLLGDDIVQAETPGLRQLMDEYEKTLSSIIGVQQVPEEETHRYGIIDPLTSEGRRYQVKNFVEKPPKGTAPSNLAILGRYVFTPEIFMYLEEQQVGAGGEIQLTDAIQKLNEIQRVFAYDFEGKRYDVGEKLGFITTTLEFAMQDKELRDQLVPFMEGLLNKEEI

SEQ ID NO: 1356 - protein, 267 aa, Staphylococcus aureus
MKKIATATIATAGFATIAIASGNQAHASEQDNYGYNPNDPTSYSYTYTIDAQGNYHYTWKGNWHPSQLNQDNGYYSYYYYNGYNNYNNYNNGYSYNNYSRYNNYSNNNQSYNYNNYNSYNTNSYRTGGLGASYSTSSNNVQVTTTMAPSSNGRSISSGYTSGRNLYTSGQCTYYVFDRVGGKIGSTWGNASNWANAAARAGYTVNNTPKAGAIMQTTQGAYGHVAYVESVNSNGSVRVSEMNYGYGPGVVTSRTISASQAAGYNFIH

SEQ ID NO: 1357 - protein, 454 aa, Yersinia pestis
MTLGQFGGLFCIYLIAVIFILTLTYQEFRRVKFNFNVLFSMLYLLTFYFGFPLTCMLVFQFGVAVVPVEYLLYAMLSATAFYGIYYVTYKTRLRQPRSQPRTPIFTMNRVETNLTWVLLALVAVGTVGIFFMQNGFLLFKLDSYSKIFSSDVSGVALKRFFYFFIPAMLVVYFLKQDRRAWFFFLASTVAFGILTYVIVGGTRANIIIAFSLFLFIGIVRGWITLWMLAAAGVFGIVGMFWLALKRYGLDVNGAEAFYTFLYLTRDTFSPWENLGLLLQNYDKIDFQGLAPIVRDFYVFIPSALWPERPDLVLNTANYFTWDVLDNHSGLAISPTLIGSLVVMGGVLFIPLGAIVVGLIIKWFDWLYEQGKAESNRYKAAILQSFCFGAVFNIIVLAREGLDSFVSRVVFFCVIFGACLVLAKLLYWLFDTAGLIKRQGIKSNRLSTPNAGNQL

SEQ ID NO: 1358 - protein, 463 aa, Vibrio cholerae
MKELTCFKAYDIRGQLGSELDNEIAYRIGRSYGQFLKSENDADKTVVVGGDVRLTSEALKQALANGLMDAGINVIDIGVTGTEEIYFATFYLGVDGGIEVTASHNPMDYNGMKLVREGSKPISGDTGLREIQALAEKNEFMDVEVKGNYKKVSLLPEYVDHLISYITPAKIKPMKLVINSGNGAAGHVIDELEKRFIELSIPLEIIKVHHEEDGNFPNGIPNPLLPECRADTANAVKEHKADMGIAFDGDFDRCFLFDENGDFIEGYYIVGLLAEAFLQKEQGAKIIHDPRLSWNTIDVVTKSGGVPVMSKTGHAFIKERMRKEDAIYGGEMSAHHYFRDFGYCDSGMIPWLLITELLSLAPDISLSKLISAKRFLFPCSGEINFKVKQAKLIMEQVYLHYYENSIHFSAIDGISLEFEGWRFNLRDSNTEPLLRLNVESKQNIALMNDKVEELTKLIKKLDI

SEQ ID NO: 1359 - protein, 490 aa, Treponema denticola
MKKKLFFALLVLILSSCSLFFQKEYGTITIDLEGGRARSINSSTGLPNLADSELEIDILTEGNSSIYKKILASEPKFFQADFPIGSRLEITVKLNGPSSSWSAHNSHTVKEGNNDIRLLLNKNASSLANVGFSTAAVVNKYEFNIAGKRIDINSRELPVFTRDSRGRLYIAYKDINWKLNRYESDGTPNNFASDSPILTTITGASSVNLASDPVTGKVYVAADSNLYRIKDDGAVTPTGGTAHPAGPIAVYNNNLFVLGVSAVSGNNPLKMFTITEEGSVLTLNQAGSLIPVSTGQITISTSGSETTINVDFKDILVKKDKIYILFAKNNLPTPSTPSPYYSLGGMLEYTYNSSGVIDNPQKYGFNDTVTAGDDIVTAGEANFYGPACFIGYDEQSISIADDGCTFKKEGGSVRIYKNVNRIFSFNTSTKSLYSYATENKWFNEYEETATPPPPLPVRLARSYCGRKIVIRGIPRSAYLSRVAQFVCKTL

SEQ ID NO: 1360 - protein, 795 aa, Haemophilus influenzae
MKKLLIASLLFGTTTTVFAAPFVAKDIRVDGVQGDLEQQIRASLPVRAGQRVTDNDVANIVRSLFVSGRFDDVKAHQEGDVLVVSVVAKSIISDVKIKGNSIIPTEALKQNLDANGFKVGDVLIREKLNEFAKSVKEHYASVGRYNATVEPIVNTLPNNRAEILIQINEDDKAKLASLTFKGNESVSSSTLQEQMELQPDSWWKLWGNKFEGAQFEKDLQSIRDYYLNNGYAKAQITKTDVQLNDEKTKVNVTIDVNEGLQYDLRSARIIGNLGGMSAELEPLLSALHLNDTFRRSDIADVENAIKAKLGERGYGSATVNSVPDFDDANKTLAITLVVDAGRRLTVRQLRFEGNTVSADSTLRQEMRQQEGTWYNSQLVELGKIRLDRTGFFETVENRIDPINGSNDEVDVVYKVKERNTGSINFGIGYGTESGISYQASVKQDNFLGTGAAVSIAGTKNDYGTSVNLGYTEPYFTKDGVSLGGNVFFENYDNSKSDTSSNYKRTTYGSNVTLGFPVNENNSYYVGLGHTYNKISNFALEYNRNLYIQSMKFKGNGIKTNDFDFSFGWNYNSLNRGYFPTKGVKASLGGRVTIPGSDNKYYKLSADVQGFYPLDRDHLWVVSAKASAGYANGFGNKRLPFYQTYTAGGIGSLRGFAYGSIGPNAIYAEHGNGNGTFKKISSDVIGGNAITTASAELIVPTPFVSDKSQNTVRTSLFVDAASVWNTKWKSDKSGLDNNVLKSLPDYGKSSRIRASTGVGFQWQSPIGPLVFSYAKPIKKYENDDVEQFQFSIGGSF

SEQ ID NO: 1361 - protein, 245 aa, Photorhabdus luminescens
MELNNIPKYSIRGLNIWGFRDMAHFLDHIFQREQVKTGTMVAINAEKVLTAEEDTALSTLLSDAEYLYADGISIVRAIRRKYPDTEVSRVAGADLWEAIMERAGKEGTPIFLVGGKPEILKQTESKLRAQWNVNIVGSQNGYFTPEERNAVFERIHASGAVIVTVAMGSPKQEIFMRDCRKIHSNALYMGVGGTYDVFTGHVKRAPKAWQNLGLEWLYRLLSQPSRIRRQFKLLKFIGYYYSGRL

SEQ ID NO: 1362 - protein, 194 aa, Borrelia burgdorferi
MYKNGFFKNYLSLLLIFLVIACTSKDSSNEYVEEQEAENSSKPDDSKIDEHTIGHVFHAMGVVHSKKDRKSLGENIKVFYFSEEDGHFQTIPSKENAKLIVYFYDNVYAGEAPISISGKEAFIFVGITSDFKKIINSNLHGAKSDLIGTFKDLNIKNSKLEITVDENNSDAKTFLESVNYIIDGVEKISPMLTN

SEQ ID NO: 1363 - protein, 391 aa, Staphylococcus carnosus
MVTQNKKILIITGSFGNGHLQVTNSVVNQLNEMNLKHLSVIEHDLFMEAHPILTSICKKYYINSFKYFRNSYKQFYYSRPEDVNKCFYKYYGLNKLINLLIKEKPDLILLTFPTPVMSVLTEQFNMNIPIATVMTDYRLHKNWVTPHSSRYYVATPDLKQEFVNVGVPEDIIKITGIPISEQFDEDIDTKVWMHKNHLDPNRPTILMSAGAFGVSKGFDVMISDILERSPETQIVMICGRNKELKRALRQQFKEYANVLILGYTHHMNEWMASSHLMVTKPGGITISEALARKIPMIFLDPAPGQELENAHYFQSKGMGKIADTTEEAIQLITELTQDENALAHMAEQMQDLKVKYPTYKLCRDLLHLLDHSSQFEEIYGKVPMYAKLFIK

SEQ ID NO: 1364 - protein, 177 aa, Treponema pallidum
MNMCTDGKKYHSTATSAAVGASAPGVPDARAIAAICEQLRQHVADLGVLYIKLHNYHWHIYGIEFKQVHELLEEYYVSVTEAFDTIAERLLQLGAQAPASMAEYLALSGIAEETEKEITIVSALARVKRDFEYLSTRFSQTQVLAAESGDAVTDGIITDILRTLGKAIWMLGATLKA

SEQ ID NO: 1365 - protein, 284 aa, Brucella suis biovar
MKRGCAIAVMICGLITSVSAASAADLIVQEPVFEPLPQPALAGWYLRGDIGYNFKSKTGGKWNFWNQFEEPYRGVDDTFNYDDFSLKGGASYGVGVGYRFNDMLRTDLTLDYFRASINGRTNCPSYVKSSHGLNPVEDNCHYEDNSKASVWTAMANAYVDLPRVGPLTPYLGAGIGAAYVKYDTWKTSEICPTCTLQSDKDGFDSWRFAMALMAGVSYDLTDQLKLDLGYRYLRVNGGNAYGYDEQDRQVINQYGQGAGADGPQAKDNGFNIHTVRAGLRYEFR

SEQ ID NO: 1366 - protein, 160 aa, Escherichia coli
MKKLAIMAAASMVFAVSSAHAGFTPSGTTGTTKLTVTEECQVRVGDLTVAKTRGQLTDAAPIGPVTVQALGCNARQVALKADTDNFEQGKFFLISDNNRDKLYVNIRPMDNSAWTTDNGVFYKNDVGSWGGTIGIYVDGQQTNTPPGNYTLTLTGGYWAK

SEQ ID NO: 1367 - protein, 361 aa, Yersinia pseudotuberculosis
MITLTHVLGSDIPHHNLTVLRFFNDVLAKCLPVEQVRHFMVAAKETAPFSSFPQLDINTYSDKKALAEAVIARAQADRSARFFWHGQFNATLWLALLSGKIKPGQVYWHVWGADLYEDAKSLKFRLFYLLRRIAQGRVGHVFATRGDLIHYQQRHPRVPASLLYFPTRMDPALTAINIDKPLAGPMTILVGNSGDTTNRHIEALKAIHQQFGPDVRVIIPMGYPANNEAYIEQVRQAGLALFSQDNLRILTEQIPFDDYLNILRECDLGYFIFNRQQGIGTLCLLTQFGVPFVLSRKNPFWQDLAEQHIPVFFYGDTLDEPLIREAQRQLAGLDKQAIAFFNPNYIEGWKQALALAAGEHP

SEQ ID NO: 1368 - protein, 158 aa, Dichelobacter nodosus
MKSLQKGFTLIELMIVVAIIGILAAFAIPAYNDYIARSQAAEGLTLADGLKVRISDHLESGECKGDANPASGSLGNDDKGKYALATIDGDYNKDAKTADEKNGCKVVITYGQGTAGEKISKLIVGKKLVLDQFVNGSYKYNEGETDLELKFIPNAVKN

SEQ ID NO: 1369 - protein, 233 aa, Staphylococcus aureus
MKKTIMASSLAVALGVTGYAAGTGHQAHAAEVNVDQAHLVDLAHNHQDQLNAAPIKDGAYDIHFVKDGFQYNFTSNGTTWSWSYEAANGQTAGFSNVAGADYTTSYNQGSNVQSVSYNAQSSNSNVEAVSAPTYHNYSTSTTSSSVRLSNGNTAGATGSSAAQIMAQRTGVSASTWAAIIARESNGQVNAYNPSGASGLFQTMPGWGPTNTVDQQINAAVKAYKAQGLGAWGF

SEQ ID NO: 1370 - protein, 340 aa, Mycobacterium tuberculosis
MTFFEQVRRLRSAATTLPRRLAIAAMGAVLVYGLVGTFGGPATAGAFSRPGLPVEYLQVPSASMGRDIKVQFQGGGPHAVYLLDGLRAQDDYNGWDINTPAFEEYYQSGLSVIMPVGGQSSFYTDWYQPSQSNGQNYTYKWETFLTREMPAWLQANKGVSPTGNAAVGLSMSGGSALILAAYYPQQFPYAASLSGFLNPSEGWWPTLIGLAMNDSGGYNANSMWGPSSDPAWKRNDPMVQIPRLVANNTRIWVYCGNGTPSDLGGDNIPAKFLEGLTLRTNQTFRDTYAADGGRNGVFNFPPNGTHSWPYWNEQLVAMKADIQHVLNGATPPAAPAAPAA

SEQ ID NO: 1371 - protein, 288 aa, Staphylococcus aureus
MKKIKKAIIPAAGLGTRFLPATKAMPKEMLPILDKPTIQYIVEEAARAGIEDIIIVTGRHKRAIEDHFDSQKELEMVLKEKGKSELLEKVQYSTELANIFYVRQKEQKGLGHAISSARQFIGNEPFAVLLGDDIVESEVPAVKQLIDVYEETGHSVIGVQEVPEADTHRYGIIDPLTKNGRQYEVKKFVEKPAQGTAPSNLAIMGRYVLTPEIFDYLKTQKEGAGNEIQLTDAIERMNNDNQVYAYDFEGERYDVGEKLGFVKTTIEYALKDDSMREELTRFIKALGL

SEQ ID NO: 1372 - protein, 269 aa, Staphylococcus aureus
MKKIATATIATAGFATIAIASGNQAHASEQDNYGYNPNDPTSYSYTYTIDAQGNYHYTWKGNWHPSQLNQDNGYYSYYYYNGYNNYNYNNYNNGYSYNNYSRYNNYSNNNQSYNYNNYNSYNTNSYRTGGLGASYSTSSNNVQVTTTMAPSSNGRSISSGYTSGRNLYTSGQCTYYVFDRVGGKIGSTWGNASNWANAAARAGYTVNNTPKAGAIMQTTQGAYGHVAYVESVNSNGSVRVSEMNYGYGPGVVTSRTISASQAAGYNFIH

SEQ ID NO: 1373 - protein, 450 aa, Escherichia coli
MSLLQFSGLFVVWLLCTLFIATLTWFEFRRVRFNFNVFFSLLFLLTFFFGFPLTSVLVFRFDVGVAPPEILLQALLSAGCFYAVYYVTYKTRLRKRVADAPRRPLFTMNRVETNLTWVILMGIALVSVGIFFMHNGFLLFRLNSYSQIFSSEVSGVALKRFFYFFIPAMLVVYFLRQDSKAWLFFLVSTVAFGLLTYMIVGGTRANIIIAFAIFLFIGIIRGWISLWMLAAAGVLGIVGMFWLALKRYGMNVSGDEAFYTFLYLTRDTFSPWENLALLLQNYDNIDFQGLAPIVRDFYVFIPSWLWPGRPSMVLNSANYFTWEVLNNHSGLAISPTLIGSLVVMGGALFIPLGAIVVGLIIKWFDWLYELGNRETNRYKAAILHSFCFGAIFNMIVLAREGLDSFVSRVVFFIVVFGACLMIAKLLYWLFESAGLIHKRTKSSLRTQVEG

SEQ ID NO: 1374 - protein, 1275 aa, Myxococcus xanthus
MWQKWADVTQGHVAAPGPGDFAQMVAVLRKVLEERQPCAPEQCDERSALEGALRLATEHLHRALPDGGQGMSSLQEAARLADPAAFSIPASHRARGGTLVTSAKRAFVNGLEPFHVEMLRPQGNFNRALVRVLEYLTVHRALGLRDDVSSWAVAQLEPLAVPTRWVVGSHRGRVAGALVGFAKRGYLYTLGPVLEAVLQGQARWNLAMVEAIRAAAGAQAPGEAEARRHVADVEALREPLAGRTLPGALRVTQPLWGEVLRRQSRFNAESVLALANLLGTRTAPPQPPSLADYPAWCAAREPARVTAAQEAVARLSRRPLISLVTPVHDASEAFLRECLASVSSQVYADWEWLLVDDASTAPHLARILREAAERESRIRVLTASSEGDTARATNEGFAACRGDFVGFLGAEDTLSPHALAEVALAFLAQPELALLYTDEDGLDAQGHRSAPFFKPDWSPDLLRSVDYVRHFLVVRRETLAQVGGLREGFDGAQGHDLMLRLSEATSSIGHITEPLYHAREGSAASASRGAGLDTATKAGVRALSEHLARQGESAEVTSPAPIQYRVRYPVRGTPKVSIIVPFKDRPDLLRTLVDSLLAQTRYPHFEVLLVSNNSTRPETFALLEQWVDPRLVKLTWDHPFNYPAINNWAAKQASGELLLFLNNDMEVVDPSWLDELVSQAQRPEVGAVGCKLLFPEGTVQHAGVVVGMTGFAGHPFWRLPEGPISTPFGHTEWTRNWLSVTSACVILRREVFESLGGFDERFQVCGSDVELGLRLNAQGLRVVCTAQTRLIHHESASRRADAIPEADYWLSYAAYRPWLGPKGDPYYNPHLTLTATDCGLRRHPEDGEQLAVRTLGRDVPSARDVRGEQRARAQRHLIEHLEAWDFTPEQAQTSRESAPAALAALRAKGRVETATWFVPAFGHVYAGIHTIFRFADLMQRRHGVRSDFVIYDQPNVRPGDIEARVAAICPGAVGAVRVLRRPEDVALLPACDLALATAWTSAYRVLHHPRAGLRGYFVQDYEPLFHAAGTPSALAEQTYGLGFYGIFNTPGLYEHVVGLHGMEGAWFEPAVDGTLFHPRRPPRQGPVRVFFYGRPGNERNGFELGLAALAQLKRELGPAVEVLAAGAEWDPEAYGVRGLVTNLGMLPAERTGALYRECDVGLCFMFTRHPSYLPLEMMACGVTVVTNDNPTNRWLLTHGENCLLAEPTPSGVLARLRDAVSNGALRARLGTNAAERVSRTSWEAEVDRVMKGLLNTGAHPAATLDDRASSLEHAS

SEQ ID NO: 1375 - protein, 357 aa, Listeria innocua serovar
MKKRTFALALSMIIASGVVLGACGSSSDDKKSGDDKSSKDFTVAMVTDTGGVDDRSFNQSAWEGLQKFGKANDMEKGTDGYNYLQSASEADYKTNLNTAVRSDYDLIYGIGYKLKDAIEEVSKQKPKNQFAIVDDTIDDRDNVVSIGFKDNDGSYLVGVVAGLTTKTNKVGFVGGVKGAVIDRFEAGFTAGVKAVNPNAQIDVQYANDFAKADKGQQIASSMYSSGVDVIFHAAGGTGNGVFAEAKNLKKKDPSRAVWVIGVDRDQWDEGKVTANDGKDYNVTLTSEIKRVDIAVDDLATRTKAGDFPGGTKIEYGLDKDAVGLSEHQDNISKDVLAKVEEYKQKIVDGDIKVPEKP

SEQ ID NO: 1376 - protein, 515 aa, Coxiella burnetii
MSTQLRAAEISDIIESRIEKFGIKAEERTEGTILNIKDGIVRVYGLRDVMFGEMVEFPENTYGLAFNLERDSVGAVVMGPYEHLEEGMTARCTGRILEVPVGEALLGRVVDGLGKPIDGKGPIDTSETSPIEKVAPGVITRKSVDTSLPTGLKSIDAMVPIGRGQRELIIGDRQTGKTAIAIDTIINQKHTGVKCIYVAIGQKQSSVAAVVRKLEEHGAMEHTIVVNASASEAAALQYLAPYAGCTMGEYFRDRGQDALIVYDDLTKQAWAYRQISLLLRRPPGREAYPGDIFYLHSRLLERAAHVNEAYVKEFTKGKVTGKTGSLTALPIIETQAGDVSAFIPTNVISITDGQIYLDVNLFNAGIRPAINAGLSVSRVGGAAQTKIIKKLIGGLRIALAQYRELEAFSQFASDLDEATRKQLEHGQRVMEILKQPQYQPLSVGEMAIIWYVVNNNYLDQVELKKVVDFERSLLSFLRDQHQDLLDEINKNPNYSEKIIEKIKAVVEEFVKTQSY

SEQ ID NO: 1377 - protein, 245 aa, Proteus mirabilis
MDTNSIPKYSIRGHNIWGFKDMAHFLDYLYQGAQIKSGSLIAINAEKILTAETDKGLNQLLDEADYLYADGISVVRGIRRKYPDAQVSRIAGADLWEALMERAGKEGTPVFLVGGKPQVLAQTESKLKAQWNVNIVGSQDGYFTPQDRDALFERIKASGAKIVTIAMGSPKQELFIRACRQVHPDALYMGVGGTYDVFTGHVKRAPKAWQNLGLEWLYRLLSQPSRIKRQFKLLKFVGYYYSNKL

SEQ ID NO: 1378 - protein, 416 aa, Mycoplasma hyopneumoniae
MLRKKFLYSSAIYATSLASIIAFVAAGCGQTESGSTSDSKPQAETLKHKVSNDSIRIALTDPDNPRWISAQKDIISYVDETEAATSTITKNQDAQNNWLTQQANLSPAPKGFIIAPENGSGVGTAVNTIADKGIPIVAYDRLITGSDKYDWYVSFDNEKVGELQGLSLAAGLLGKEDGAFDSIDQMNEYLKSHMPQETISFYTIAGSQDDNNSQYFYNGAMKVLKELMKNSQNKIIDLSPEGENAVYVPGWNYGTAGQRIQSFLTINKDPAGGNKIKAVGSKPASIFKGFLAPNDGMAEQAITKLKLEGFDTQKIFVTGQDYNDKAKTFIKDGDQNMTIYKPDKVLGKVAVEVLRVLIAKKNKASRSEVENELKAKLPNISFKYDNQTYKVQGKNINTILVSPVIVTKANVDNPDA

SEQ ID NO: 1379 - protein, 391 aa, Staphylococcus epidermidis
MVTQNKKILIITGSFGNGHMQVTQSIVNQLNEMNLNHLSVIQHDLFMEAHPIMTSICKKWYINSFKYFRNTYKRFYYSRPNELDKCFYKYYGLNKLINLLIKEKPDLILLTFPTPVMSVLTEQFNINIPIATVMTDYRMHKNWITPYSQRYYVATKDTKDDFIEAGVPASYIKVTGIPIADKFEESIDKEEWLSQQHLDPSKPTILMSAGAFGVSKGFDYMINNILEKSPNSQVVMICGRSKELKRSLKAKFKDNPSVIILGYTNHMNEWMASSQLMITKPGGITISEGLSRCIPMIFLNPAPGQELENAYYFESKGFGKIADTPNEAIDIVSDLTNNEETLKVMSSKMLESKVGYSTRKICKDLLDLIGHSSQPDEIYGKVPLYARFFVK

SEQ ID NO: 1380 - protein, 521 aa, Orientia tsutsugamushi
MRKIMLIASAMSALSLPFSANAIEFDENSLECGPYAKVGIVGGVLSGVESARLDPADSEGKKHLPLIKGMPFGVTLAAGMTITPGVRAEISAMYLMNVKAEVELGKMGSDANTGTTADASAGVIRKHKKLTPPQPNIMPISIADRDIAVDIPNAAGQGNVDVRAAARIAWLKNYAGIDYYVPDSNNPQGRVVNPVLLNIPQGNPNPAGGGGRAAPAAFDILDHAQWRDVVVGITALSNANKPNVSAVKILSDKISQIYADIKPFANVASVQISETPLPDSASVDQIQNKVQELNKVLEDVRESFDGFILNAFAQPVRLNFQIPQVVQGQGQQPQAAATAQEAAAAAAIRALNDGENNGIIQLYKDLYKLQRNVALKKSMKQLGDELGVDQGQEGGCSKDKKQSDTTAEESKKEGKKGKEIEFDLHMAVGQVKLYADLFTIDSFSVYAGIGAGLAYTHGKIDGKDIKAHTGMVGSLALGVAANVADGVYMDVDAGYLYSFSKIEEKYQMNAFVASAGIRYNF

SEQ ID NO: 1381 - protein, 216 aa, Coxiella burnetii
MASLSSNLKTLMTSVHINASELARRTGIAQPIIHRLSTGQNTNPKLATIKPIARYFMVNISQLIGEEPLPSDQSPQITGNYRAWNRVPLISWKDATSWPEALPHYQTSDEVMYISTDANVSKLAYGLIIQGCAMEPLFPNGTTIIVEPERKPKDRDFVVVRLQGEPEARLRQIITEGNDRYLKSLNPELEKLEVARLAQEDQFLGVMAQAKVDFLR

SEQ ID NO: 1382 - protein, 144 aa, Mycobacterium tuberculosis; identical to SEQ ID NO: 1322

SEQ ID NO: 1383 - protein, 367 aa, Escherichia coli
MNLLTVSTDLISIFLFTTLFLFFARKVAKKVGLVDKPNFRKRHQGLIPLVGGISVYAGICFTFGIVDYYIPHASLYLACAGVLVFIGALDDRFDISVKIRATIQAAVGIVMMVFGKLYLSSLGYIFGSWEMVLGPFGYFLTLFAVWAAINAFNMVDGIDGLLGGLSCVSFAAIGMILWFDGQTSLAIWCFAMIAAILPYIMLNLGILGRRYKVFMGDAGSTLIGFTVIWILLETTQGKTHPISPVTALWIIAIPLMDMVAIMYRRLRKGMSPFSPDRQHIHHLIMRAGFTSRQAFVLITLAAALLASIGVLAEYSHFVPEWVMLVLFLLAFFLYGYCIKRAWKVARFIKRVKRRLRRNRGGSPNLTK

SEQ ID NO: 1384 - protein, 170 aa, Escherichia coli
MKFKKTIGAMALTTMFVAVSASAVEKNITVTASVDPVIDLLQADGNALPSAVKLAYSPASKTFESYRVMTQVHTNDATKKVIVKLADTPQLTDVLNSTVQMPISVSWGGQVLSTTAKEFEAAALGYSASGVNGVSSSQELVISAAPKTAGTAPTAGNYSGVVSLVMTLGS

SEQ ID NO: 1385 - protein, 565 aa, Shigella flexneri
MFSVNNTHSSVSCSPSINSNSTSNEHYLRILTEWEKNSSPGEERGIAFNRLSQCFQNQEAVLNLSDLNLTSLPELPKHISALIVENNKLTSLPKLPAFLKELNADNNRLSVIPELPESLTTLSVRSNQLENLPVLPNHLTSLFVENNRLYNLPALPEKLKFLHVYYNRLTTLPDLPDKLEILCAQRNNLVTFPQFSDRNNIRQKEYYFHFNQITTLPESFSQLDSSYRINISGNPLSTRVLQSLQRLTSSPDYHGPQIYFSMSDGQQNTLHRPLADAVTAWFPENKQSDVSQIWHAFEHEEHANTFSAFLDRLSDTVSARNTSGFREQVAAWLEKLSASAELRQQSFAVAADATESCEDRVALTWNNLRKTLLVHQASEGLFDNDTGALLSLGREMFRLEILEDIARDKVRTLHFVDEIEVYLAFQTMLAEKLQLSTAVKEMRFYGVSGVTANDLRTAEAMVRSREENEFTDWFSLWGPWHAVLKRTEADRWAQAEEQKYEMLENEYSQRVADRLKASGLSGDADAEREAGAQVMRETEQQIYRQLTDEVLALRLSENGSRLHHS

SEQ ID NO: 1386 - protein, 708 aa, Escherichia coli
MTKDLNTLVSELPEIYQTIFGHPEWDGDAARDCNQRLDLITEQYDNLSRALGRPLNVLDLGCAQGFFSLSLASKGATIVGIDFQQENINVCRALAEENPDFAAEFRVGRIEEVIAALEEGEFDLAIGLSVFHHIVHLHGIDEVKRLLSRLADVTQAVILELAVKEEPFYWGVSQPDDPRELIEQCAFYRLIGEFDTHLSPVPRPMYLVSNHRVLINDFNQPFQHWQNQPYAGAGLAHKRSRRYFFGEDYVCKFFYYDMPHGILTAEESQRNKYELHNEIKFLTQPPAGFDAPAVLAHGENAQSGWLVMEKLPGRLLSDMLAAGEEIDREKILGSLLRSLAALEKQGFWHDDVRPWNVMVDARQHARLIDFGSIVTTPQDCSWPTNLVQSFFVFVNELFAENKSWNGFWRSAPVHPFNLPQPWSNWLYAVWQEPVERWNFVLLLALFEKKAKLPSAEQQRGATEQWIIAQETVLLELQSRVRNESAGSEALRGQIHTLEQQMAQLQSAQDAFVEKAQQQVEVSHELTWLGENMEQLAALLQTAQAHAQADVQPELPPETAELLQRLEAANREIHHLSNENQQLRQEIEKIHRSRSWRMTKGYRYLGLQIHLLRQYGFVQRCKHFIKRVLRFVFSFMRKHPQVKHTAVNGLHKLGLYQPAYRLYRRMNPLPHSQYQADAQILSQTELQVMHPELLPPEVYEIYLKLTKNK

SEQ ID NO: 1387 - protein, 288 aa, Staphylococcus aureus
MKKIKKAIIPAAGLGTRFLPATKAMPKEMLPILDKPTIQYIIEEAARAGIEDIIIVTGRHKRAIEDHFDSQKELEMVLKEKGKSELLEKVQYSTELANIFYVRQKEQKGLGHAISSARQFIGNEPFAVLLGDDIVESEVPAVKQLIDVYEETGHSVIGVQEVPEADTHRYGIIDPLTKNGRQYEVKKFVEKPAQGTAPSNLAIMGRYVLTPEIFDYLKTQKEGAGNEIQLTDAIERMNNDNQVYAYDFEGERYDVGEKLGFVKTTIEYALKDDSMREELTRFIKELGL

SEQ ID NO: 1388 - protein, 255 aa, Staphylococcus aureus; identical to SEQ ID NO: 1292

SEQ ID NO: 1389 - protein, 327 aa, Salmonella typhimurium
MTVDSNTSSGRGNDPEQIDLIELLLQLWRGKMTIIVAVIIAILLAVGYLMIAKEKWTSTAIITQPDAAQVATYTNALNVLYGGNAPKISEVQANFISRFSSAFSALSEVLDNQKEREKLTIEQSVKGQALPLSVSYVSTTAEGAQRRLAEYIQQVDEEVAKELEVDLKDNITLQTKTLQESLETQEVVAQEQKDLRIKQIEEALRYADEAKITQPQIQQTQDVTQDTMFLLGSDALKSMIQNEATRPLVFSPAYYQTKQTLLDIKNLKVTADTVHVYRYVMKPTLPVRRDSPKTAITLVLAVLLGGMIGAGIVLGRNALRSYKPKAL

SEQ ID NO: 1390 - protein, 378 aa, Salmonella borreze
MSKVLFVFGTRPEAIKMAPLVIEFKNNPAIEVKVCVTGQHREMLDQVLDFFEIEPDYDLNIMKQKQSLGSITCSILTRLDEILASFMPAHIFVHGDTTTTFAASLAAFYQNIKVWHIEAGLRTWNMNSPFPEEGNRQLTSKLAFFHAAPTLQAKDNLLRESVKEKNIIVTGNTVIDALLIGIKKITGSTGDVREIISLKNKLNLDKKIILVTLHRRENQGELLRTICDDIKQLALEHDDIEIVFPVHMSPRIREVVNEKLSGVVNIKLVEPLAYPGFIWLMNNAHFILSDSGGVQEEAPSLQKPVLVARDTTERPEVIENGAAMLVDPRIPNNIYSSCKKLLSDERLYEKMSQAGNPFGDGKASKKILDYFVSLEDIK

SEQ ID NO: 1391 - protein, 357 aa, Listeria monocytogenes serovar
MKKRTFALALSMIIASGVILGACGSSSDDKKSSDDKSSKDFTVAMVTDTGGVDDRSFNQSAWEGLQKFGKANDMEKGTDGYNYLQSASEADYKTNLNTAVRSDYDLIYGIGYKLKDAIEEVSKQKPKNQFAIVDDTIDDRDNVVSIGFKDNDGSYLVGVVAGLTTKTNKVGFVGGVKGTVIDRFEAGFTAGVKAVNPNAQIDVQYANDFAKADKGQQIASSMYSSGVDVIFHAAGGTGNGVFAEAKNLKKKDPSRAVWVIGVDRDQWDEGKVTANDGKDYNVTLTSEIKRVDIAVEDLATRAKAGDFPGGTKIEYGLDKDAVGLSEHQDNISKDVLAKVEEYKQKIVDGDIKVPEKP

SEQ ID NO: 1392 - protein, 1164 aa, Xanthomonas euvesicatoria
MDPIRSRTPSPARELLPGPQPDGVQPTADRGVSPPAGGPLDGLPARRTMSRTRLPSPPAPSPAFSAGSFSDLLRQFDPSLFNTSLFDSLPPFGAHHTEAATGEWDEVQSGLRAADAPPPTMRVAVTAARPPRAKPAPRRRAAQPSDASPAAQVDLRTLGYSQQQQEKIKPKVRSTVAQHHEALVGHGFTHAHIVALSQHPAALGTVAVKYQDMIAALPEATHEAIVGVGKQWSGARALEALLTVAGELRGPPLQLDTGQLLKIAKRGGVTAVEAVHAWRNALTGAPLNLTPEQVVAIASHDGGKQALETVQRLLPVLCQAHGLTPQQVVAIASNGGGKQALETVQRLLPVLCQAHGLTPQQVVAIASNSGGKQALETVQRLLPVLCQAHGLTPEQVVAIASNGGGKQALETVQRLLPVLCQAHGLTPEQVVAIASNIGGKQALETVQALLPVLCQAHGLTPEQVVAIASNIGGKQALETVQALLPVLCQAHGLTPEQVVAIASNIGGKQALETVQALLPVLCQAHGLTPEQVVAIASHDGGKQALETVQRLLPVLCQAHGLTPEQVVAIASHDGGKQALETVQRLLPVLCQAHGLTPQQVVAIASNGGGKQALETVQRLLPVLCQAHGLTPEQVVAIASNSGGKQALETVQALLPVLCQAHGLTPEQVVAIASNSGGKQALETVQRLLPVLCQAHGLTPEQVVAIASHDGGKQALETVQRLLPVLCQAHGLTPEQVVAIASHDGGKQALETVQRLLPVLCQAHGLTPEQVVAIASHDGGKQALETVQRLLPVLCQAHGLTPQQVVAIASNGGGRPALETVQRLLPVLCQAHGLTPEQVVAIASHDGGKQALETVQRLLPVLCQAHGLTPQQVVAIASNGGGRPALESIVAQLSRPDPALAALTNDHLVALACLGGRPALDAVKKGLPHAPALIKRTNRRIPERTSHRVADHAQVVRVLGFFQCHSHPAQAFDDAMTQFGMSRHGLLQLFRRVGVTELEARSGTLPPASQRWDRILQASGMKRAKPSPTSTQTPDQASLHAFADSLERDLDAPSPMHEGDQTRASSRKRSRSDRAVTGPSAQQSFEVRVPEQRDALHLPLSWRVKRPRTSIGGGLPDPGTPTAADLAASSTVMREQDEDPFAGAADDFPAFNEEELAWLMELLPQ

SEQ ID NO: 1393 - protein, 246 aa, Salmonella enteritidis; identical to SEQ ID NO: 1293

SEQ ID NO: 1394 - protein, 1653 aa, Streptococcus criceti
MKRKETFGFRKSKISKSLCGALLGTAIVVSVAGQRALAEDMTTSTTSAVDTTAVVGTETGNPATNLPEKQADSSSQAEASQAQAEQKTGSMPVDVATTELDEAVKSAAEAGVTVSQDETVDKGTVGTSQEADEKSGEIKADYSKQAETIKITTETYKADVAANQSETNRINQENAAKKAQYEQDLAANKAEVERITNKNAQAKADYEAKLAQYQKELAAVQQANSDNQAAYAAAKDAYEKELARVQKANADAKAAYEQAVAANTAKNEQIKAANAAIQQRNAQAKADYEAKLAQYQKDLAAVQAGNAANEADYQAKKTAYEQELARVQAANAAAKTAYEQAVAANTAKNEQIKAANTAIQQRNAQAKADYEAKLAQYQNDLAVVQAGNAANEADYQAKKTAYEQELARVQAANAAAKTAYEQAVAANTAKNEEIKAANEAIKQRNAQAKADYEAKLAQYQKDLAAVQTGNAANEADYQAKKTAYDQELARVQKANADAKAAYDQAVKDNQAKNAEIAAENAAIRQRNAAAKADYEAKLAQYQKDLAAVQKANAANEADYQAKKLAYETELARVQKANADAKAAYDQAVKDNQAKNAEIAAENAAIRQRNAAAKADYEAKLAKYQQDLTQYQKDFADYQSKLKAYEDAQAAYKAALAELEKHKNDDGYLPSPESQPFIFEQEKNATLEITSGDKVYNADEFYAEADKLDYIKADTLFNTEKRRVAYEHFKGGIQDSADWPGKRVFLPKGKPVVARYSNLKNSELNGKKIASAEFIYTLKDTSLNADKIPAMLYDDPTQTIYYFEFFGSQSIDVDIKFYDEDGNKIDATGALLDFSSLNRGHGWPQYNGINTIEKVNYHTGTAIEINGSSVKDNGDGLYAATPNYTKANQSRFESNEWDTTNSPVNWYGAIVGKQTGPDIKFTLSAENASGIWFAFDSKIKAKDIPNKPMESEPTPPVAPTQPLEPVYEVEKDLEPVPVEPNYDPEPTPPTRTPDQPEPNKPDEPNYEVEKPSEPAPIEPNYDPEPTPPTRTPDQPEPNKPDEPNYEVEQPQEPAPVEPKYDPEPTPPVDPVYEKIPDPVNVPTVRYHYYKLAIQPGVTKAIKNSDNLDIDKTLVAKQSTVKFQLLTADLPAGRPETTSFVLVDPLPSGYQFNLEATKVASPGFDTSYDEATNTVTFTATAETLANLNKDLTKTVSTIYPTIVGQVLNDGAIYTNNFTLTVNDAYGIKSNIVRVTTPGKPNDPKHPNNSYIKPHKVNKNENGVVIDGKAVLAGSTNYYELTWDLDQYKGDSSGKESIQKGFFYLEDYPEEALDLRPDLVKITDTSGKAVTGISVTDYASLEAAPEMVREMLQKANITPKGAFQLFTADNPQAFYDTYVVKGIDLTIVTPMVVKAEMGKTGGGYENRAYQIDFGNGYESNPVINNVPKIDPKKDVTLTLDPADLTNIDGQTIALNQTFNYRLIGGIIPPKHAEELFEYSFDDDYDQTGDKYTGQYKAFAKVDFTLKDGTIIKAGTDLTQYTKAQIDEVNGRILVSFKEDFLRSVSVDSAFQAEVYLQMKRIAVGTFENTYVNTVNGITYSSNTVRTSTPEPKTPEDPRTSHTVVYRPIKDKTYQPAPPQTGQLPATGDANNAYMPLLGLVSLTAGFSLLGLRRKKN

SEQ ID NO: 1395 - protein, 164 aa, Yersinia enterocolitica
MSTKTNSTKATSEKTDSLKTNRGTKSSAGYSDQNIPLGGCILADTPITFNENKPVTKVKVRNTGDRPIQVGSHFHFFEANRALEFDRAAAYGKRLNISSTTAIRFEPGDETEVPLIPFGGKQTLYGFNNLVDGWTGEGVVPNSERPDKLEAIRRAAERGFKSSK

SEQ ID NO: 1396 - protein, 437 aa, Coxiella burnetii
MQKRHPIIYLLITLLIFVPVSYGALDLELTKGVTAAIPIAIMPFAGPSVLAPGDETIPQVIKNDLQNSGQFRVTGSGNLDQTAASLEQIDYSYWRKQKVNALVVGAINPLGMRRYRVAFTLINVFDSNNRLLSESFNVNAKELRNLAHHISDLIYQKLTGVRGVFSTKIAYVLVQASSENTAAKYTLEVADADGFNPQPLLVSDMPIMSPTWSPDGNKIAYVSFEGHRAAIYLQDLATGRRQRLSEAPGINGAPAFSPDGKQLALVLTKTGNPKIYILNLADGHLREITKGWSIDTEPAWSPDGKSLLFTSNRDGTPQIYNYSFADGSINRVTYRGDYNARPSFMPDGKSIIMMHRENGLFGIARQDLSTGQVQILSESGTDESPSLAPNGKMAIYAMEYGGRGVLAQVSIDGQIKLRLPARNGNVQEPAWSPYLGV

SEQ ID NO: 1397 - protein, 1327 aa, Mycobacterium tuberculosis
MRCGIVVNVTGPPPTIDRRYHDAVIVGLDNVVDKATRVHAAAWTKFLDDYLTRRPQRTGEDHCPLTHDDYRRFLAGKPDGVADFLAARGIRLPPGSPTDLTDDTVYGLQNLERQTFLQLLNTGVPEGKSIASFARRLQVAGVRVAAHTSHRNYGHTLDATGLAEVFAVFVDGAVTAELGLPAEPNPAGLIETAKRLGANPGRCVVIDSCQTGLRAGRNGGFALVIAVDAHGDAENLLSSGADAVVADLAAVTVGSGDAAISTIPDALQVYSQLKRLLTGRRPAVFLDFDGTLSDIVERPEAATLVDGAAEALRALAAQCPVAVISGRDLADVRNRVKVDGLWLAGSHGFELVAPDGSHHQNAAATAAIDGLAEAAAQLADALREIAGAVVEHKRFAVAVHYRNVADDSVDNLIAAVRRLGHAAGLRVTTGRKVVELRPDIAWDKGKALDWIGERLGPAEVGPDLRLPIYIGDDLTDEDAFDAVRFTGVGIVVRHNEHGDRRSAATFRLECPYTVCQFLSQLACDLQEAVQHDDPWTLVFHGYDPGQERLREALCAVGNGYLGSRGCAPESAESEAHYPGTYVAGVYNQLTDHIEGCTVDNESLVNLPNWLSLTFRIDGGAWFNVDTVELLSYRQTFDLRRATLTRSLRFRDAGGRVTTMTQERFASMNRPNLVALQTRIESENWSGTVDFRSLVDGGVHNTLVDRYRQLSSQHLTTAEIEVLADSVLLRTQTSQSGIAIAVAARSTLWRDGQRVDAQYRVARDTNRGGHDIQVTLSAGQSVTLEKVATIFTSRDAATLTAAISAQRCLGEAGRYAELCQQHVRAWARLWERCAIDLTGNTEELRLVRLHLLHLLQTISPHTAELDAGVPARGLNGEAYRGHVFWDALFVAPVLSLRMPKVARSLLDYRYRRLPAARRAAHRAGHLGAMYPWQSGSDGSEVSQQLHLNPRSGRWTPDPSDRAHHVGLAVAYNAWHYYQVTGDRQYLVDCGAELLVEIARFWVGLAKLDDSRGRYLIRGVIGPDEFHSGYPGNEYDGIDNNAYTNVMAVWVILRAMEALDLLPLTDRRHLIEKLGLTTQERDQWDDVSRRMFVPFHDGVISQFEGYSELAELDWDHYRHRYGNIQRLDRILEAEGDSVNNYQASKQADALMLLYLLSSDELIGLLARLGYRFAPTQIPGTVDYYLARTSDGSTLSAVVHAWVLARANRSNAMEYFRQVLRSDIADVQGGTTQEGIHLAAMAGSIDLLQRCYSGLELRDDRLVLSPQWPEALGPLEFPFVYRRHQLSLRISGRSATLTAESGDAEPIEVECRGHVQRLRCGHTIEVGCSR

SEQ ID NO: 1398 - protein, 154 aa, Rickettsia amblyommatis
MKLLSKIMIIALAASTLQACNGPGGMNKQGTGTLLGGAGGALLGSQFGKGKGQLVGVGVGALLGAVLGGQVGAGMDEQDRRIAELTSQKALETAPNGSNVEWRNPDNGNYGYVTPNKTYRNSTGQYCREYTQTVVIGGKQQKAYGNACRQPDGQ

SEQ ID NO: 1399 - protein, 367 aa, Escherichia coli; identical to SEQ ID NO: 1383

SEQ ID NO: 1400 - protein, 170 aa, Escherichia coli
MKFKKTIGAMALTTMFVAVSASAVEKNITVTASVDPAIDLLQADGNALPSAVKLAYSPASKTFESYRVMTQVHTNDATKKVIVKLADTPQLTDVLNSTVQMPISVSWGGQVLSTTAKEFEAAALGYSASGVNGVSSSQELVISAAPKTAGTAPTAGNYSGVVSLVMTLGS

SEQ ID NO: 1401 - protein, 545 aa, Shigella boydii
MLPINNNFSLPQNSFYNTISGTYADYFSAWDKWEKQALPGEERDEAVSRLKECLINNSDELRLDRLNLSSLPDNLPAQITLLNVSYNQLTNLPELPVTLKKLYSASNKLSELPVLPPALESLQVQHNELENLPALPDSLLTMNISYNEIVSLPSLPQALKNLRATRNFLTELPAFSEGNNPVVREYFFDRNQISHIPESILNLRNECSIHISDNPLSSHALQALQRLTSSPDYHGPRIYFSMSDGQQNTLHRPLADAVTAWFPENKQSDVSQIWHAFEHEEHANTFSAFLDRLSDTVSARNTSGFREQVAAWLEKLSASAELRQQSFAVAADATESCEDRVALTWNNLRKTLLVHQASEGLFDNDTGALLSLGREMFRLEILEDIARDKVRTLHFVDEIEVYLAFQTMLAEKLQLSTAVKEMRFYGVSGVTANDLRTAEAMVRSREENEFKDWFSLWGPWHAVLKRTEADRWAQAEEQKYEMLENEYPQRVADRLKASGLSGDADAEREAGAQVMRETEQLIYRQLTDEVLALRLSENGSQLHHS

SEQ ID NO: 1402 - protein, 338 aa, Mycobacterium tuberculosis
MQLVDRVRGAVTGMSRRLVVGAVGAALVSGLVGAVGGTATAGAFSRPGLPVEYLQVPSPSMGRDIKVQFQSGGANSPALYLLDGLRAQDDFSGWDINTPAFEWYDQSGLSVVMPVGGQSSFYSDWYQPACGKAGCQTYKWETFLTSELPGWLQANRHVKPTGSAVVGLSMAASSALTLAIYHPQQFVYAGAMSGLLDPSQAMGPTLIGLAMGDAGGYKASDMWGPKEDPAWQRNDPLLNVGKLIANNTRVWVYCGNGKPSDLGGNNLPAKFLEGFVRTSNIKFQDAYNAGGGHNGVFDFPDSGTHSWEYWGAQLNAMKPDLQRALGATPNTGPAPQGA

SEQ ID NO: 1403 - protein, 288 aa, Staphylococcus epidermidis
MKKIKKAIIPAAGLGTRFLPATKAMPKEMLPILDKPTIQYIVEEASKAGIEDIIIVTGKHKRAIEDHFDNQKELEMVLENKGKADLLEKVQYSTDLANIFYVRQKEQKGLGHAIHTAKQFIGNEPFAVLLGDDIVESDTPAIKQLMDVYEETGHSVIGVQEVPESDTHRYGVIDPSAKEGSRYEVRQFVEKPKQGTAPSNLAIMGRYVLTPEIFDYLETQQEGAGNEIQLTDAIERMNSKQQVYAYDFEGNRYDVGEKLGFVKTTIEYALKDPEMSQDLKAFIKQLDI

SEQ ID NO: 1404 - protein, 212 aa, Histophilus somni
MTSAANKRSIMTLFLDKVDIYCHQVRIVLAEKGVAYATEIVDSESISEDLMELNPYGTIPTLVDRDLVLFNSRIIMEYLDERFPHPPLMPVYPVSRGKSRLLMLRIEQDWYPVLEKAEKGSESERAIALKQLKEEILAIAPVFSQSLYFMSEEFRLVDCYIAPLLWRMQQLGVVFTGTGSKAIKSYMERVFQRDSFLQSVGEMTPKNLMEDK

SEQ ID NO: 1405 - protein, 463 aa, Pectobacterium atrosepticum
MTLGQFGGLFVVYLISVIFILSLTWMEFRRVRFNFNVLFSLLYLLTFYFGFPFTCVLVFRFGVEVVPVQYLLQAMLSATAFYAVYYVSYKTRLRQKTSVPRAPLLTVNRVEANLTWLLLALIAVATVGIFFLNNGFLLFKLRSYSQIFSSDVSGVALKRFFYFFIPAMLVVYFLRQTQRAWLLFLIGTVAFGMLTYVIVGGTRANLIIAFALFLFIGIVRGWITLWMLVAAGIFGIVGMFWLALKRYGLDVSGDYAFYTFLYLTRDTFSPWENLALLWQNYDKIEFQGLAPIARDFYVFIPSWLWPDRPNLVLNSANYFTWEVLNNHSGLAISPTLLGSLVVMGGVLFIPLGAIAVGLVIKWFDWVYELGKNDSNRYKAAILQAFCFGAVFNIIVLTREGVDSFVSRVVFFCLIFGLCLLVAKLLYWLLESAGLIRQRLRRMRATPLAPTPNTVQDPVIKEQI

SEQ ID NO: 1406 - protein, 257 aa, Salmonella typhi
MKAVILAGGLGTRLSEETIVKPKPMVEIGGKPILWHIMKMYSVHGIKDFIICCGYKGYVIKEYFANYFLHMSDVTFHMAENRMEVHHKRVEPWNVTLVDTGDSSMTGGRLKRVAEYVKDDEAFLFTYGDGVADLDIKATIDFHKAHGKKATLTATFPPGRFGALDIQAGQVRSFQEKPKGDGAMINGGFFVLNPSVIDLIDNDATTWEQEPLMTLAQQGELMAFEHPGFWQPMDTLRDKVYLEGLWEKGKAPWKTWE

SEQ ID NO: 1407 - protein, 114 aa, Mycobacterium tuberculosis
MESEPLYKLKAEFFKTLAHPARIRILELLVERDRSVGELLSSDVGLESSNLSQQLGVLRRAGVVAARRDGNAMIYSIAAPDIAELLAVARKVLARVLSDRVAVLEDLRAGGSAT

SEQ ID NO: 1408 - protein, 325 aa, Mycobacterium bovis
MHQVDPNLTRRKGRLAALAIAAMASASLVTVAVPATANADPEPAPPVPTTAASPPSTAAAPPAPATPVAPPPPAAANTPNAQPGDPNAAPPPADPNAPPPPVIAPNAPQPVRIDNPVGGFSFALPAGWVESDAAHLDYGSALLSKTTGDPPFPGQPPPVANDTRIVLGRLDQKLYASAEATDSKAAARLGSDMGEFYMPYPGTRINQETVSLDANGVSGSASYYEVKFSDPSKPNGQIWTGVIGSPAANAPDAGPPQRWFVVWLGTANNPVDKGAAKALAESIRPLVAPPPAPAPAPAEPAPAPAPAGEVAPTPTTPTPQRTLPA

SEQ ID NO: 1409 - protein, 450 aa, Escherichia coli; identical to SEQ ID NO: 1373

SEQ ID NO: 1410 - protein, 1565 aa, Streptococcus mutans
MKVKKTYGFRKSKISKTLCGAVLGTVAAVSVAGQKVFADETTTTSDVDTKVVGTQTGNPATNLPEAQGSASKEAEQSQTKLERQMVHTIEVPKTDLDQAAKDAKSAGVNVVQDADVNKGTVKTPEEAVQKETEIKEDYTKQAEDIKKTTDQYKSDVAAHEAEVAKIKAKNQATKEQYEKDMAAHKAEVERINAANAASKTAYEAKLAQYQADLAAVQKTNAANQAAYQKALAAYQAELKRVQEANAAAKAAYDTAVAANNAKNTEIAAANEEIRKRNATAKAEYETKLAQYQAELKRVQEANAANEADYQAKLTAYQTELARVQKANADAKATYEAAVAANNAKNAALTAENTAIKQRNENAKATYEAALKQYEADLAAVKKANAANEADYQAKLTAYQTELARVQKANADAKAAYEAAVAANNAANAALTAENTAIKKRNADAKADYEAKLAKYQADLAKYQKDLADYPVKLKAYEDEQTSIKAALAELEKHKNEDGNLTEPSAQNLVYDLEPNANLSLTTDGKFLKASAVDDAFSKSTSKAKYDQKILQLDDLDITNLEQSNDVASSMELYGNFGDKAGWSTTVSNNSQVKWGSVLLERGQSATATYTNLQNSYYNGKKISKIVYKYTVDPKSKFQGQKVWLGIFTDPTLGVFASAYTGQVEKNTSIFIKNEFTFYHEDEKPINFDNALLSVTSLNREHNSIEMAKDYSGKFVKISGSSIGEKNGMIYATDTLNFKQGEGGSRWTMYKNSQAGSGWDSSDAPNSWYGAGAIKMSGPNNHVTVGATSATNVMPVSDMPVVPGKDNTDGKKPNIWYSLNGKIRAVNVPKVTKEKPTPPVKPTAPTKPTYETEKPLKPAPVAPNYEKEPTPPTRTPDQAEPNKPTPPTYETEKPLEPAPVEPSYEAEPTPPTRTPDQAEPNKPTPPTYETEKPLEPAPVEPSYEAEPTPPTPTPDQPEPNKPVEPTYEVIPTPPTDPVYQDLPTPPSDPTVHFHYFKLAVQPQVNKEIRNNNDINIDRTLVAKQSVVKFQLKTADLPAGRDETTSFVLVDPLPSGYQFNPEATKAASPGFDVTYDNATNTVTFKATAATLATFNADLTKSVATIYPTVVGQVLNDGATYKNNFTLTVNDAYGIKSNVVRVTTPGKPNDPDNPNNNYIKPTKVNKNENGVVIDGKTVLAGSTNYYELTWDLDQYKNDRSSADTIQKGFYYVDDYPEEALELRQDLVKITDANGNEVTGVSVDNYTNLEAAPQEIRDVLSKAGIRPKGAFQIFRADNPREFYDTYVKTGIDLKIVSPMVVKKQMGQTGGSYENQAYQIDFGNGYASNIVINNVPKINPKKDVTLTLDPADTNNVDGQTIPLNTVFNYRLIGGIIPANHSEELFEYNFYDDYDQTGDHYTGQYKVFAKVDITLKNGVIIKSGTELTQYTTAEVDTTKGAITIKFKEAFLRSVSIDSAFQAESYIQMKRIAVGTFENTYINTVNGVTYSSNTVKTTTPEDPADPTDPQDPSSPRTSTVIIYKPQSTAYQPSSVQETLPNTGVTNNAYMPLLGIIGLVTSFSLLGLKAKKD

SEQ ID NO: 1411 - protein, 304 aa, Vibrio anguillarum
MKYPRSLSWEKISSSTISIREFNRFENKKKVAIFCGYVRDKYEFNYHDRTYQWLRNNDYYVILVMPKSGILLESDLCKACDVFIERENFGYDFGSYACGLQYVNLIEGSERIDRLLFVNDSFIGPFGYCNLIEDSSEFWGNTDSNQVKYHYQSYLFGFNLEKVNLDIINNFFFSRGDIYTDDKSLVIENFELSLYEYFNGKGLRCSVLHPISVLKSDFIKQTFHFISYPYLTSKIFFYIMVIARDVNPTHQLWLQLFKRGFPFIKKELLRDNPTGYPELYKKVEEVMGSNDFNGEYKQIFKNHL

SEQ ID NO: 1412 - protein, 345 aa, Treponema pallidum
MNAHTLVYSGVALACAAMLGSCASGAKEEAEKKAAEQRALLVESAHADRRLMEARIGAQESGADTQHPELFSQIQDVERQSTDAKIEGDLKKAAGVASEAADKYEILRNRVEVADLQSKIQTHQLAQYDGDSANAAEESWKKALELYETDSAQCLQSTVEALESYRKVAHEGFGRLLPDMKARAGAAKTDVGGLKVAVELRPQLEEADSQYQEAREAEEVNARAKAFSGYHRALEIYTELGKVVRLKKTEAEKALQSAKTKQKASSDLARSADKSAPLPENAQGFSKEPIEVEPLPNDRLNTTQADESAPIPISDTSSPSRVQSRGVEDGGRSPKSSMNEEGASR

SEQ ID NO: 1413 - protein, 367 aa, Shigella dysenteriae
MEKPIFVTQPNLPPLEEFIPYLEIIWQNKQFTNNGPMHQKLEKKLCEFLGVEYISLFNNGTIALITAVQALGVKGEVITTPYSFVATAHSLVLNGLKPVFVDIDPKTLNIDPRRIEEAITPETQAIMPVHCYGNPCDTQAIADIAQKYNLKVIYDAAHAFGVEDDDGSVLRHGDLSVLSFHATKVFSTFEGGAIVCNSKEMKEKIDRLKNFGYIDETNINIIGSNGKMSEVNAAFGLLQLEHMDTFLRGRMNADMFYRQKLKDITGISIVIPSGQKISNFSYFPILVESDFPLSRDELFNYLKNQNIFARRYFYPVIPDFQAYLNVGEVCDVKNAREIASKVLCLPMHAELSSDILEYIVSTIREIK

SEQ ID NO: 1414 - protein, 154 aa, Rickettsia australis
MKLLSKIMIIALAASMLQACNSPGGMNKQGTGTLLGGAGGALLGSQFGKGKGQLVGVGVGALLGAVLGGQIGAGMDEQDRRLAELTSQRALETAPSGSNVEWRNPDNGNYGYVTPNKTYRNSNGQYCREYTQTVVIGGKQQKAYGNACRQPDGQ

SEQ ID NO: 1415 - protein, 246 aa, Yersinia pseudotuberculosis
MEPNTVIPKYNVRGFEIWGFRDMAQVLDHLLGSGPVKTGTLVAMNAEKLLKAEDDTALCELIKNAEYLYADGISMVRAIRRKYPQAELSRVAGADLWEALMQRAGQQGTPVFLVGGKPDVLAETEAKLRAQWNVNLVGSQDGYFTPEQREALFARIAASGAAIVTVAMGSPKQEIFMRDCRKFYPDALYMGVGGTYDVFTGHVKRAPKIWQNMGLEWLYRLLAQPSRIRRQLKLLKFVGYYYSGRL

SEQ ID NO: 1416 - protein, 180 aa, Escherichia coli
MQKIQFILGILAAASSSATLAYDGKITFNGKVVDQTCSVTTESKNLTVKLPTVSANSLASSGKVVGLTPFTILLEGCNTPAVTGAQNVNAYFEPNANTDYTTGNLTNTASSGASNVQIQLLNADGVKAIKLGQAAAAQSVDTVAINDANVTLRYNAQYYATGVATAGDVTSTVNYTIAYQ

SEQ ID NO: 1417 - protein, 332 aa, Shigella dysenteriae
MNITTLTNSISTSSFSPNNTNGSSTETVNSDIKTTTSSHPVSSLTMLNDTLHNIRTTNQALKKELSQKTLTKTSLEEIALHSSQISMDVNKSAQLLNILSKTEYPINKDARELLHSAPKEAELDGYEMISHRELWAKIANSINDINEQYLKVYEHAVSSYTQMYQEFSAVLSSLAGWISPGGNDGNSVKLQVKSLKDALTTLKKNYEDKPLYPATNTVSEQEANKWLTELGGTIGTVSAKNGGYVVSINMTPIYNMLNRLDNLGGNGEVVLDNAKYQAWNAGFSAEDETMKNNLQTLVQKYSNANSIFDNLVKVLSSTISSCTDTDKLFLHF

SEQ ID NO: 1418 - protein, 325 aa, Mycobacterium bovis; identical to SEQ ID NO: 1290

SEQ ID NO: 1419 - protein, 288 aa, Staphylococcus epidermidis; identical to SEQ ID NO: 1403

SEQ ID NO: 1420 - protein, 255 aa, Staphylococcus aureus; identical to SEQ ID NO: 1292

SEQ ID NO: 1421 - protein, 348 aa, Salmonella typhimurium
MTQPLPGARAVSAENELDIRGLFRTLWAGKFWIIGIGLLFALIALAYTFFARQEWSATAITDRPTVNMLGGYYSQQQFLRNLDIKTDPASSDKPSVMDEAYKEFIMQLASWDTRRDFWLQTDYYKQRMVGNSKADAAMLDELINNIQFTPGDFTRAINDNVKLIAETAPDANNLLRQYVAFASQRAASHLNDELKGAWAARTVQMKAQVKRQEEVAKAIYSRRVNSIEQALKIAEQHNISRSATDVPADELPDSELFLLGRPMLQARLENLQAVGPAFDLDYFQNRAMLNTLNVGPTLDPRFQTYRYLRTPEEPVKRDSPRRAFLMIMWGIVGALIGAGVALTRRRTI

SEQ ID NO: 1422 - protein, 388 aa, Escherichia coli
MIYLVISVFLITAFICLYLKKDIFYPAVCVNIIFALVLLGYEITSDIYAFQLNDATLIFLLCNVLTFTLSCLLTESVLDLNIRKVNNAIYSIPSKKVHNVGLLVISFSMIYICMRLSNYQFGTSLLSYMNLIRDADVEDTSRNFSAYMQPIILTTFALFIWSKKFTNTKVSKTFTLLVFIVFIFAIILNTGKQIVFMVIISYAFIVGVNRVKHYVYLITAVGVLFSLYMLFLRGLPGGMAYYLSMYLVSPIIAFQEFYFQQVSNSASSHVFWFFERLMGLLTGGVSMSLHKEFVWVGLPTNVYTAFSDYVYISAELSYLMMVIHGCISGVLWRLSRNYISVKIFYSYFIYTFSFIFYHESFMTNISSWIQITLCIIVFSQFLKAQKIK

SEQ ID NO: 1423 - protein, 198 aa, Coxiella burnetii
MVDDEKREVSEEIEEALKKLHLDDVDWARALSPHEILYLLDRCPFLQIVSTNEIEAFSETKFITAQSGWTIHHYGEAMSSSPGPLLFQGGDYRILGDDDEGDDGEGGTIVNPGKGTIVKQAFTTAAEMIALAQKSGWRGVRIIDGHPLMQWAAWMQATDDAFHLEGYEPDEKARKKRERVKRSEVEDQLKINVKPTRR

SEQ ID NO: 1424 - protein, 329 aa, Yersinia pestis
MSLNVKLHPSGIIFTSDGTSTILDAALDSNIHIEYSCKDGTCGSCKAILISGEVDSAENTFLTEEDVAKGAILTCCSKAKSDIELDVNYYPELSHIQKKTYPCKLDSIEFIGEDIAILSLRLPPTAKIQYLAGQYIDLIINGQRRSYSIANAPGGNGNIELHVRKVVNGVFSNIIFNELKLQQLLRIEGPQGTFFVREDNLPIVFLAGGTGFAPVKSMVEALINKNDQRQVHIYWGMPAGHNFYSDIANEWAIKHPNIHYVPVVSGDDSTWTGATGFVHQAVLEDIPDLSLFNVYACGSLAMITAARNDFINHGLAENKFFSDAFVPSK

SEQ ID NO: 1425 - protein, 450 aa, Escherichia coli; identical to SEQ ID NO: 1373

SEQ ID NO: 1426 - protein, 1655 aa, Rickettsia conorii
MAQKPNFLKKLISAGLVTASTATIVASFAGSAMGAAIQQNRTTNAVATTVDGVGFDQTAVPANVAVPLNAVITAGVNKGITLNTPAGSFNGLFLNTANNLDVTVREDTTLGFITNVVNNANHFNLMLNAGKTLTITGQGITNVQAAATKNANNVVAQVNNGAAIDNNDLQGVGRIDCGAAASTLVFNLANPTTQKAPLILGDNAVIVNGANGTLNVTNGFIKVSSKSFATVNVINIGDGQGIMFNTDADNVNTLNLQANGATITFNGTDGTGRLVLLSKNAAATDFNVTGSLGGNLKGIIEFNTVAVNGQLKANAGANAAVIGTNNGAGRAAGFVVSVDNGKVATIDGQVYAKDMVIQSANAVGQVNFRHIVDVGTDGTTAFKTAASKVAITQNSNFGTTDFGNLAAQIIVPNTMTLNGNFTGDASNPGNTAGVITFDANGTLASASADANVAVTNNITAIEASGAGVVQLSGTHAAELRLGNAGSVFKLADGTVINGKVNQTALVGGALAAGTITLDGSATITGDIGNAGGAAALQGITLANDATKTLTLGGANIIGANGGTINFQANGGTIKLTSTQNNIVVDFDLAIATDQTGVVDASSLTNAQTLTINGKIGTVGANNKTLGQFNIGSSKTVLSDGDVAINELVIGNNGAVQFAHNTYLITRTTNAAGQGKIIFNPVVNNNTTLATGTNLGSATNPLAEINFGSKGAANVDTVLNVGKGVNLYATNITTTDANVGSFIFNAGGTNIVSGTVGGQQGNKFNTVALDNGTTVKFLGNATFNGNTTIAANSTLQIGGNYTADFVASADGTGIVEFVNTGPITVTLNKQAAPVNALKQITVSGPGNVVINEIGNAGNYHGAVTDTIAFENSSLGAVVFLPRGIPFNDAGNRIPLTIKSTVGNKTATGFDVPSVIVLGVDSVIADGQVIGDQNNIVGLGLGSDNDIIVNATTLYAGIGTINNNQGTVTLSGGIPNTPGTVYGLGTGIGASKFKQVTFTTDYNNLGNIIATNATINDGVTVTTGGIAGIGFDGKITLGSVNGNGNVRFVDGILSHSTSMIGTTKANNGTVTYLGNAFVGNIGDSDTPVASVRFTGSDGGAGLQGNIYSQVIDFGTYNLGISNSNVILGGGTTAINGKINLRTNTLTFASGTSTWGNNTSIETTLTLANGNIGNIVILEGAQVNATTTGTTTIKVQDNANANFSGTQTYTLIQGGARFNGTLGGPNFVVTGSNRFVNYGLIRAANQDYVITRTNNAENVVTNDIANSSFGGAPGVGQNVTTFVNATNTAAYNNLLLAKNSANSANFVGAIVTDTSAAITNAQLDVAKDIQAQLGNRLGALRYLGTPETAEMAGPEAGAIPAAVAAGDEAVDNVAYGIWAKPFYTDAHQSKKGGLAGYKAKTTGVVIGLDTLANDNLMIGAAIGITKTDIKHQDYKKGDKTDVNGFSFSLYGAQQLVKNFFAQGSAIFSLNQVKNKSQRYFFDANGNMSKQIAAGHYDNMTFGGNLTVGYDYNAMQGVLVTPMAGLSYLKSSDENYKETGTTVANKQVNSKFSDRTDLIVGAKVAGSTMNITDLAVYPEVHAFVVHKVTGRLSKTQSVLDGQVTPCISQPDRTAKTSYNLGLSASIRSDAKMEYGIGYDAQISSKYTAHQGTLKVRVNF

SEQ ID NO: 1427 - protein, 396 aa, Bartonella henselae
MNDPMDENNLLNDRDMIKDGHGKKQRPNTSKAAALVILFGVCLYLAYSTLFTEKQQPVEVQKEGIIKQTELFRPAPPKPVSLEPTIEKNNVLLPKVELPTPPKKTTNSDDSLLEAAQRAPVLAYANTQKGQGSTEKNKDISANQPEAKPDETAQRFNHLLKPTTLEGIRAAKLGNRNYIIAMGASIPCILETAISSDQQGFASCIVSRDILSDNGRVVLLDKGTQIVGEYRAGLKKGQKRLFVLWNRAKTPNGIIITLASPATDALGRSGMDGDIDNHWLERIGSALLVSIVKDATNYVKGRLPKDQDKNNSETISSGQNIANIAVENYANIPPTLSKNQGEMVNVFVARDLDFSNVYKLKVIENKKQIVNRALSRNFYKNSAVICNEPKLAHIER

SEQ ID NO: 1428 - protein, 344 aa, Treponema phagedenis
MKLKSLVFSLSALFLVLGFTGCKSKAQAKAEQEAQERKAFMAENAKIEKRLMQAKNAATEAEANVYYPEKFAQIEDLEKQSSEAKEQDDLKKANSLGSAAADKYETLANKMKIANQRSKIEANKLAKYDEESYRLGEEAEKKIDGLYKSDSVAALQTSNESLMYYNKVIDAGYKSLSQDAKKTADDAKAALTAVKVAASLKPQQEEADGIYAKAEEAENSAQYEQSYGGYTSAAQAYNDLTQIIKAKRLEAQKAMQAAKTKQELSAKLANEADKESPLPENAEGFSKEPIEVEPLPTDVLNAPQDEKAEETVPVEEMNENSSEEVNGNAEKIESTEEPIEGGVQ

SEQ ID NO: 1429 - protein, 356 aa, Bartonella henselae
MNQNLHTLSDETVAIVLTKLEPISTFLKDENLFEIVINRPYQVMTEGVEGWKTIETPALSFNELMGIAKVVASYSKQNISEKNPILSATLPGNERIQIVIPPAVEKNTISMTIRKPSSRSFSLEDLANKGLFSVCEQVSFTPLNNYLSHLSELKHIDHDLVRAYAKKDFVFFLNQAVQCQKNILIAGKTGSGKTTLSKALIAKIPDDERIITIEDTPELVVPQPNYVSMIYSKDGQGLASVGPKELLESALRMRPDRILLQELRDGTAFYYIRNVNSGHPGSITTVHASTALAAFEQMTLLVKESEGGGDLERDDIRGLLISMIDIIIQCKRIEGKFKVTEIYYDPFKQRNIFGGN

SEQ ID NO: 1430 - protein, 159 aa, Rickettsia bellii
MKIISKIIVILLAASMLQACQGPGGMNKQGSGTLIGGTAGALLGSQFGGGTGRLAAVGAGALLGAILGNQIGAGMDEQDRKLAELTSQRALEAAPSGSSVQWRNPDNGNYGTVTPSKAYKNNTGQYCREYTQTVVVGGKQQKAYGTACRQPDGQWQVVN

SEQ ID NO: 1431 - protein, 246 aa, Escherichia coli
MNNNTMAPTYTLRGLQLIGWRDMQHALDYLFADGHLKQGTLVAINAEKMLTIEDNAEVRELINAAEFKYADGISVVRSVRKKYPQAQVSRVAGADLWEELMARAGKEGTPVFLVGGKPEVLAQTEAKLRNQWNVNIVGSQDGYFKPEQRQALFERIHASGAQIVTVAMGSPKQEIFMRDCRLVHPDALYMGVGGTYDVFTGHVKRAPKIWQTLGLEWLYRLLSQPSRIKRQLRLLRYLRWHYTGNL

SEQ ID NO: 1432 - protein, 187 aa, Escherichia coli
MIKSVIAGAVAMAVVSFGANAAASIPQGQGEVSFKGTVVDAPCGIETQSAKQEIDFGQISKSFLQEGGETQPKDLNIKLVNCDITNLKQLQGGAAKKGTVSLTFSGVPAENADDMLQTVGDTNTAIVVTDSSGKRVKFDGATETGASNLINGDNTIHFTAFVKKDNSGKNVAEGAFSAVANFNLTYQ

SEQ ID NO: 1433 - protein, 259 aa, Shigella flexneri
MSEQRKPCKRGCIHTGVMLYGVLLQGAIPREYMISHQTDVRVNENRVNEQGCFLARKQMYDNSCGAASLLCAAKELGVDKIPQYKGSMSEMTRKSSLDLDNRCERDLYLITSGNYNPRIHKDNIADAGYSMPDKIVMATRLLGLNAYVVEESNIFSQVISFIYPDARDLLIGMGCNIVHQRDVLSSNQRVLEAVAVSFIGVPVGLHWVLCRPDGSYMDPAVGENYSCFSTMELGARRSNSNFIGYTKIGISIVITNEAL

SEQ ID NO: 1434 - protein, 371 aa, Mycobacterium tuberculosis
MRVGIPTETKNNEFRVAITPAGVAELTRRGHEVLIQAGAGEGSAITDADFKAAGAQLVGTADQVWADADLLLKVKEPIAAEYGRLRHGQILFTFLHLAASRACTDALLDSGTTSIAYETVQTADGALPLLAPMSEVAGRLAAQVGAYHLMRTQGGRGVLMGGVPGVEPADVVVIGAGTAGYNAARIANGMGATVTVLDINIDKLRQLDAEFCGRIHTRYSSAYELEGAVKRADLVIGAVLVPGAKAPKLVSNSLVAHMKPGAVLVDIAIDQGGCFEGSRPTTYDHPTFAVHDTLFYCVANMPASVPKTSTYALTNATMPYVLELADHGWRAACRSNPALAKGLSTHEGALLSERVATDLGVPFTEPASVLA

SEQ ID NO: 1435 - protein, 120 aa, Escherichia coli
MLKLFAKYTSIGVLNTLIHWVVFGVCIYVAHTNQALANFAGFVVAVSFSFFANAKFTFKASTTTMRYMLYVGFMGTLSATVGWAADRCALPPMITLVTFSAISLVCGFVYSKFIVFRDAK

SEQ ID NO: 1436 - protein, 1500 aa, Streptococcus gordonii
MKNKKEVYGFRKSKVAKTLCGAVLGTALIAFADKAVFADEVTETTSTSTVEVATTGNPATNLPEAQGEMSQVAKESQAKAGSKESALPVEVSSADLDKAVADAKSAGVKVVQDETKDKGTATTATDNAQKQDEIKSDYAKQAEEIKTTTEAYKKEVAAHQAETDKINAENKAADDKYQKDLKSHQEEVEKINTANATAKAEYEAKLAQYQKDLATVKKANEDSQQDYQNKLSAYQTELARVQKANAEAKEAYEKAVKENTAKNEALKVENEAIKQRNETAKATYEAAMKQYEADLAAIKKANEDNDADYQAKLAAYQTELARVQKANAEAKEAYDKAVKENTAKNTAIQAENEAIKQRNETAKATYDAAVKKYEADLAAVKQANATNEADYQAKLAAYQTELARVQKANADAKATYEKAVEDNKAKNAAIKAENEEIKQRNAVAKTDYEAKLAKYEADLAKYKKEFAAYTAALAEAESKKKQDGYLSEPRSQSLNFKSEPNAIRTIDSSVHQYGQQELDALVKSWGISPTNPDRKKSRAYSYFNAINSNNTYAKLVLEKDKPVDVTYTGLKNSSFNGKKISKVVYTYTLKETGFNDGTKMTMFASSDPTVTAWYNDYFTSTNINVKVKFYDEEGQLMNLTGGLVNFSSLNRGNGSGAIDKDAIESVRNFNGRYIPISGSSIKIHENNSAYADSSNAEKSLGARWNTSEWDTTSSPNNWYGAIVGEITQSEISFNMASSKSGNIWFAFNSNINAIGVPTKPVAPTAPTQPMYETEKPLEPAPVAPSYENEPTPPVKTPDQPEPSKPEEPTYETEKPLEPAPVAPSYENEPTPPVKTPDQPEPSKPEEPNYETEKPLEPAPVAPSYENEPTPPVKIPDQPEPSKPEEPTYDPLPTPPLAPTPKQLPTPPVVPTVHFHYSSLLAQPQINKEIKNEDGVDIDRTLVAKQSIVKFELKTEALTAGRPKTTSFVLVDPLPTGYKFDLDATKAASTGFDTTYDEASHTVTFKATDETLATYNADLTKPVETLHPTVVGRVLNDGATYTNNFTLTVNDAYGIKSNVVRVTTPGKPNDPDNPNNNYIKPTKVNKNKEGLNIDGKEVLAGSTNYYELTWDLDQYKGDKSSKEAIQNGFYYVDDYPEEALDVRPDLVKVADEKGNQVSGVSVQQYDSLEAAPKKVQDLLKKANITVKGAFQLFSADNPEEFYKQYVATGTSLVITDPMTVKSEFGKTGGKYENKAYQIDFGNGYATEVVVNNVPKITPKKDVTVSLDPTSENLDGQTVQLYQTFNYRLIGGLIPQNHSEELEDYSFVDDYDQAGDQYTGNYKTFSSLNLTMKDGSVIKAGTDLTSQTTAETDATNGIVTVRFKEDFLQKISLDSPFQAETYLQMRRIAIGTFENTYVNTVNKVAYASNTVRTTTPIPRTPDKPTPIPTPKPKDPDKPETPKEPKVPSPKVEDPSAPIPVSVGKELTTLPKTGTNDATYMPYLGLAALVGFLGLGLAKRKED

SEQ ID NO: 1437 - protein, 348 aa, Shigella flexneri; identical to SEQ ID NO: 1263

SEQ ID NO: 1438 - protein, 407 aa, Salmonella typhi
MLIISYIALCLLFIVYLYTLSVRIEGKIINVMVPYLIITVPTLYVFEGIFVYLSEVQNYTVEYLFFYTCYITYIASFVISYLYTQRKPIYNKSNTKNKPRYVFTSLLFTFLAFIIYLPVLMEFREYILSPRRIYELTRTGYGIYFYPSLMFSLVASICAFFTYKKSKLFCISIVLFNCILIFLHGNKGPIFSIFIAFILYLSYIENKKIKFMFLVKSFAVIAVIVTAFFAYTFTDGNPIENMANYSDYTRNAVLVASSNFDFMYGKLLMESEVYSRIPRAIWPDKPEDFGALYLAKVFFPDAFYRNQGAPAFGYGELYADFGLFTPVWLVISGVFKGVLAKYFSNKTQETKSAHYFIMFLFCIGISVIPVSMGWLFPEHLMIAFMVYIASSFVFSEHIRFVLLRNNK

SEQ ID NO: 1439 - protein, 134 aa, Coxiella burnetii
MSYIKRDHTALRDIAMKTFLKVVGLAASLSAASVAFSSYQLIIKNNYNQTVAISLFDDQGGTHDAGEVEANGQTKITAHLDQASGFCLNVAGKREVVCSYKSGSHPNGTITIDSTGRYCIYNNTKKISGGHGCG

SEQ ID NO: 1440 - protein, 198 aa, Helicobacter pylori
MLVTKLAPDFKAPAVLGNNEVDEHFELSKNLGKNGAILFFWPKDFTFVCPTEIIAFDKRVKDFQEKGFNVIGVSIDSEQVHFAWKNTPVEKGGIGQVTFPMVADITKSISRDYDVLFEEAIALRGAFLIDKNMKVRHAVINDLPLGRNADEMLRMVDALLHFEEHGEVCPAGWRKGDKGMKATHQGVAEYLKENSIKL

SEQ ID NO: 1441 - protein, 454 aa, Yersinia pestis; identical to SEQ ID NO: 1357

SEQ ID NO: 1442 - protein, 177 aa, Brucella abortus; identical to SEQ ID NO: 1314

SEQ ID NO: 1443 - protein, 103 aa, Bartonella henselae
MNEDPLFLACTRPAMFAGVTMEAMAFNVMATSILFILTSGFTMIGLGIGLHFVLREITKHDHNQFRVLFAWLNTRGKQKNLNRWGGGSTSPLRLIRTYEELNR

SEQ ID NO: 1444 - protein, 325 aa, Treponema pallidum
MKTRNFSLVSALYVLLGVPLFVSAASYDDNEFSRKSRAYSELAEKTYDAGEYDVSAEYARLAEDFAQKSSVYIKETMARTTAEDAMNAARTRHAWAKNERIDRAYPTEYLLASEAIKTGGLAFDSKQYDVALTWARKALDALKNVKPESQLLAKAAKEEAARKAAEARKLEEQRIAAQKAQEERKRAEEEAARKAAEARKLEEQRIAAQKAQEERKRAEEEAARKAAEEAARKAEELEKGRVLPAQYKVTTWSIDRECFWNIAKNPAVYGNPFLWKKLYEANKDKIPQSKNPNWVEPETVLVIPSLKGEEREGLYEPNVKYRPLP

SEQ ID NO: 1445 - protein, 304 aa, Vibrio anguillarum; identical to SEQ ID NO: 1411

SEQ ID NO: 1446 - protein, 159 aa, Rickettsia bellii; identical to SEQ ID NO: 1430

SEQ ID NO: 1447 - protein, 246 aa, Escherichia coli
MNNNTTAPTYTLRGLQLIGWRDMQHALDYLFADGQLKQGTLVAINAEKMLTIEDNAEVRELINAAEFKYADGISVVRSVRKKYPQAQVSRVAGADLWEELMARAGKEGTPVFLVGGKPEVLAQTEAKLRNQWNVNIVGSQDGYFKPEQRQALFERIHASGAQIVTVAMGSPKQEIIMRDCRLVHPDALYMGVGGTYDVFTGHVKRAPKIWQTLGLEWLYRLLSQPSRIKRQLRLLRYLRWHYTGNL

SEQ ID NO: 1448 - protein, 150 aa, Pseudomonas aeruginosa
MKAQKGFTLIELMIVVAIIGILAAIAIPQYQNYVARSEGASALASVNPLKTTVEEALSRGWSVKSGTGTEDATKKEVPLGVAADANKLGTIALKPDPADGTADITLTFTMGGAGPKNKGKIITLTRTAADGLWKCTSDQDEQFIPKGCSR

SEQ ID NO: 1449 - protein, 162 aa, Mycobacterium tuberculosis
MQFDVTIEIPKGQRNKYEVDHETGRVRLDRYLYTPMAYPTDYGFIEDTLGDDGDPLDALVLLPQPVFPGVLVAARPVGMFRMVDEHGGDDKVLCVPAGDPRWDHVQDIGDVPAFELDAIKHFFVHYKDLEPGKFVKAADWVDRAEAEAEVQRSVERFKAGTH

SEQ ID NO: 1450 - protein, 100 aa, Mycobacterium tuberculosis
MAKVNIKPLEDKILVQANEAETTTASGLVIPDTAKEKPQEGTVVAVGPGRWDEDGEKRIPLDVAEGDTVIYSKYGGTEIKYNGEEYLILSARDVLAVVSK

SEQ ID NO: 1451 - protein, 322 aa, Yersinia enterocolitica
MKQSKLGVLMVNLGTPDAPTPQAVKRYLAEFLSDRRVVDTSPWLWWPLLRGVILPIRSPRVAKLYQSVWMDEGSPLLVYSRRQQKALAERMPEIPVELGMSYGSPNLPDAIDKLLAQGVTKLVVLPLYPQYSCSTSAAVWDAVARILKGYRRLPSISFIRDYAEHPAYISALKQSVENSFVQHGKPDRLVLSFHGIPKRYAQLGDDYPQRCEDTSRALRAEIALPAEQIMMTYQSRFGREPWLTPYTDETLKSLPSQGVKHIQLICPGFSADCLETLEEIKEQNREVFIHAGGEKFEYIPALNDDKGHIDLLEQLVRDHLSC

SEQ ID NO: 1452 - protein, 89 aa, Shigella dysenteriae
MKKTLLIAASLSFFSASALATPDCVTGKVEYTKYNDDDTFTVKVGDKELFTNRWNLQSLLLSAQITGMTVTIKTNACHNGGGFSEVIFR

SEQ ID NO: 1453 - protein, 452 aa, Salmonella paratyphi; identical to SEQ ID NO: 1279

SEQ ID NO: 1454 - protein, 207 aa, Salmonella typhi
MSTIIMDLCSYTRLGLSGYLVSRGVKKREINDIETVDELAIACGAHQPSVVFINEDCFIHTPSDSQQIKQIINQHPDTLFIVFMAIANVHFDEYLLVRKNLLISSKSIKPDSLDTLLGDILKKESGISGTINLPTLSLSRTESSMLRMWMEGQGTIQISDRMNIKAKTVSSHKGNIKRKIKTHNKQVIYHVVRLTDNVTNGIFANMR

SEQ ID NO: 1455 - protein, 284 aa, Brucella abortus
MKRGCAIAVMICGLITSVSAASAADLIVQEPVFEPLPQPALAGWYLRGDIGYNFKSKTGGKWDFWNQFEEPYRGVDDTFNYDDFSLKGGASYGVGVGYRFNDMLRTDLTLDYFRASINGRTNCRSYVKSSHGLNPVEDNCHYEDNSKASVWTAMANAYVDLPRVGPLTPYLGAGIGAAYVKYDTWKTSEICPTCTLQSDKDGFDSWRFAMALMAGVSYDLTDQLKLDLGYRYLRVNGGNAYGYDEQDRQVINQYGQGAGADGPQAKDNGFNIHTVRAGLRYEFR

SEQ ID NO: 1456 - protein, 463 aa, Pseudomonas aeruginosa
MSTAKAPTLPASIFRAYDIRGVVGDTLTAETAYWIGRAIGSESLARGEPCVAVGRDGRLSGPELVKQLIQGLVDCGCQVSDVGMVPTPVLYYAANVLEGKSGVMLTGSHNPPDYNGFKIVVAGETLANEQIQALRERIEKNDLASGVGSVEQVDILPRYFKQIRDDIAMAKPMKVVVDCGNGVAGVIAPQLIEALGCSVIPLYCEVDGNFPNHHPDPGKPENLKDLIAKVKAENADLGLAFDGDGDRVGVVTNTGTIIYPDRLLMLFAKDVVSRNPGADIIFDVKCTRRLIALISGYGGRPVMWKTGHSLIKKKMKETGALLAGEMSGHVFFKERWFGFDDGIYSAARLLEILSQDQRDSEHVFSAFPSDISTPEINITVTEDSKFAIIEALQRDAQWGEGNITTLDGVRVDYPKGWGLVRASNTTPVLVLRFEADTEEELERIKTVFRNQLKAVDSSLPVPF

SEQ ID NO: 1457 - protein, 450 aa, Escherichia coli; identical to SEQ ID NO: 1373

SEQ ID NO: 1458 - protein, 326 aa, Neisseria gonorrhoeae
MKKSLIALTLAALPVAAMADVTLYGTIKAGVETSRSVAHHGAQADRVKTATEIADLGSKIGFKGQEDLGNGLKAIWQLEQKAYVSGTDTGWGNRQSFIGLKGGFGKVRVGRLNSVLKDTGGFNPWEGKSYYLGLSNIAQPEERHVSVRYDSPEFAGFRAVQYVPNDNSGKNHSESYHAGFNYKNSGFFVQYAGFYKRHSYTTEKHQVHRLVGGYDHDALYASVAVQQQDAKLTWRNDNSHNSQTEVAATAAYRFGNVTPRVSYAHGFKGSVYDADNDNTYDQVVVGAEYDFSKRTSALVSAGWLQRGKGTEKFVATVGGVGLRHKF

SEQ ID NO: 1459 - protein, 388 aa, Bacillus cereus
MIKNPKVLILTAHYGNGHVQVAKTLEQTFRQKGIEDVIVCDLFGESHPFITDITKYLYLKSYTIGKELYRLFYYGVEKIYDKKIASWYANFGRKRLKTLLQVEKPDIVINTFPIIAVPELKKQTGISIPVYNVLTDFCVHKIWIHREVDRYFVATDHVKELMVDIGVPAEQIVETGIPIRSSFELKVNPEIIYTKYQLCKNKKILLIVAGAHGVLGNVKELCQSFMSVPNLQVVVVCGKNEALKQDLLSLQKQNSDALKVFGYVENIDELFRVTSCMITKPGGITLSEAAALQVPVILYKPVPGQENENAMYFERKGAAVVIRDDSEVFAKTEALLQDDVKLLQMKEAMKSIYLPEPAGHIVDAILAENHAEPRHIPIKSPALAQSFT

SEQ ID NO: 1460 - protein, 384 aa, Treponema phagedenis
MKKIFLFLSLVSVLGITSLFAISYDDNEYSRKSRAYTQLAEKAYDAGEYDTAIEYSQLAENFAQESAEYIKRMMARNEAEDAMNKARTRYAWAKQQKADKNYPTEYLIAGEAIKAGGIAFDNKNYDVAVTCAEKALESLKTVEPEDKVIAKAAADKAAAEKAAKEKAAREKSAKDKAAKEKAAKEKAAKDKAAKEKAAKEKAAKDKAAKEKAAKEKAAREMAAKEKAAKDKAAKEEAARKAAEEAAARKAAEEAAARKAAEEEAARIAAEEEAARKAAEEEAARKAAEEALYNEKGEKVLPSEYKVLTWKLDRECFWNIAKNPAVYNDPFMWRKLYEANKDKIPESNNPDWVEAETILVIPSIRGERREGLYDPDVKYQALPKR

SEQ ID NO: 1461 - protein, 784 aa, Bartonella henselae
MSMMKRESLPEDYIPYIRHINQHVIALNSRCLMTVMVVEGVNFDTADIDQLNSLHNQLNTLLKNIADERVALYSHIIRRRETIYPESQFFSSFAATLDEKYKKKMVSQELYRNDLFVSLLWNPASDKTEQLASFFQRLAKAKKTQSEPDQEAIRKIEELSQDLIEGLESYGARLLSVYAHGGILFSEQSEFLHQLVGGRRERIPLTFGTIASTIYSDRVIFGKETIEIRHESNERFAGMFGWKEYPSKTRPGMTDGLLTAPFEFILTQSFVFKSKAAASVIMGRKQNQMINAADRASSQIEALDEALDDLESNRFVLGEHHLSLAVFANHPKALAEYLSKARAHLTNGGAVIAREDLGLEAAWWAQLPGNFSYRARSGAITSRNFAALSPFHSFPIGKLEGNVWGTAVALLKTQAGSPYYFNFHYGDLGNTFVCGPSGSGKTVIVNFLLAQLQKHNPTMVFFDKDQGAEIFVRAGGGKYKPLKNGQPTGIAPLKGMEYTEKNKVFLRNWVLKLVTAEGQTVTEEERQDIAKAIDALGNLPHAQRSLSALQLFFDNTSKEGIAIRLQRWLKGNDLGWVFDNDQDDLNLDSQFIGYDMTDFLDNEEIRRPLMMYLFNRILDLIDGRRIIIVIDEFWKALEDDSFKAFAQDRLKTIRKQNGMMLFATQSPKDALNSTIAHTIIEQCPTQIFFPNQKANYKDYVEDFKLTEREFELIQSELSRESRRFLIKQGQSSVVAELNLRGMNDEIAVLSGTTKNIELVNQIISEYGADPDIWLPIFHQRRENQ

SEQ ID NO: 1462 - protein, 80 aa, Rickettsia canadensis
GSQFGKGKGQLIGVGAGALLGAILGNQIGAGMDEQDRRLAELTSQRALETTPSGTSIEWRNPDNGNYGYVTPSKTYKNST

SEQ ID NO: 1463 - protein, 359 aa, Escherichia coli
MTVLIHVLGSDIPHHNRTVLRFFNDALAATSEHAREFMVVGKDDGLSDSCPTLSVQFFPGKKSLAEAVIAKAKANRQQRFFFHGQFNPTLWLALLSGGIKPSQFYWHIWGADLYELSSGLRYKLFYPLRRLAQKRVGCVFATRGDLSFFAKTHPKVRGELLYFPTRMDPSLNTMANDRQREGKMTILVGNSGDRSNEHIAALRAVHQQFGDTVKVVVPMGYPPNNEAYIEEVRQAGLELFSEENLQVLSEKLEFDAYLTLLRQCDLGYFIFARQQGIGTLCLLIQAGIPCVLNRENPFWQDMTEQHLPVLFTTDDLNEDIVREAQRQLASVDKNTIAFFSPNYLQGWQRALAIATGEVA

SEQ ID NO: 1464 - protein, 203 aa, Escherichia coli
MKKNLLITSVLAMATVSGSVLAAVTNGQLTFNWQGVVPSAPVTQSSWAFVNGLDIPFTPGTEQLNITLDSNKDITARSVKPYDFFIVPVSGNVTPGAPVTRDTSANINSVNAFLSSVPVSNGFVGNKQLTLSTAVEAAKGEVAITLNGQALKVGSASPTVVTVASNKKESHISIDMNAKAAAADVAEGAAINFVAPVTFAVDI

SEQ ID NO: 1465 - protein, 233 aa, Staphylococcus aureus
MKKTIMASSLAVALGVTGYAAGTGHQAHAAEVNVDQAHLVDLAHNHQDQLNAAPIKDGAYDIHFVKDGFQYNFTSNGTTWSWSYEAANGQTAGFSNVAGADYTTSYNQGSDVQSVSYNAQSSNSNVEAVSAPTYHNYSTSTTSSSVRLSNGNTAGATGSSAAQIMAQRTGVSASTWAAIIARESNGQVNAYNPSGASGLFQTMPGWGPTNTVDQQINAAVKAYKAQGLGAWGF

SEQ ID NO: 1466 - protein, 100 aa, Mycobacterium tuberculosis; identical to SEQ ID NO: 1328

SEQ ID NO: 1467 - protein, 203 aa, Escherichia coli
MLTEQQRRELDWEKTDGLMPVIVQHAVSGEVLMLGYMNPEALDKTIESGKVTFFSRTKQRLWTKGETSGNFLNVVNIAPDCDNDTLLVLANPIGPTCHKGTSSCFGDTAHQWLFLYQLEQLLAERKSADPETSYTAKLYASGTKRIAQKVGEEGVETALAATVHDRFELTNEASDLMYHLLVLLQDQDLDLTTVIENLRKRHQ

SEQ ID NO: 1468 - protein, 507 aa, Mycobacterium leprae
MNADPLETDAALPEQFRIRRDKRARLLAEGRDPYPVAIERTHTLAEVRAAYPDLATDSATDDIVGIAGRVIFARNSGKLCFATLQDGDGTNLQVMISLNKVGSETLDAWKVDVDLGDIVYVHGNVISSRSGELSVLADSWQMVSKSLRPLPVAHKEMSEESRVRQRYVDLIVCPQVRIVAHQRIAVIRAIRTALERRGFLEVETPMLQTLAGGAAARPFVTHSNALDIDLYLRIAPELFLKRCIVGGFDKVFELNRVFRNEGADSTHSPEFSMLETYQTYGTYDDSAVVTREIIQEVADEAIGTRQLQMPDDSVYDIDGEWETIQMYPSLSAVLGEEITPQTSVDRLRAIADRLGRGIGPEILDKPSYGHGRLVEQLWEYTVGNTLSAPTFVKDFPVETTPLTRQHRSIPGVTEKWDLYLRGVELATGYSELNDPVVQRERFGQQVRAAAAEEDEAMALDEEFLAALEYAMPPCTGTGMGIDRLLMSLTGLSIRETVLFPIVRPHSN

SEQ ID NO: 1469 - protein, 452 aa, Salmonella paratyphi; identical to SEQ ID NO: 1279

SEQ ID NO: 1470 - protein, 293 aa, Salmonella muenchen
MLDVNKKILMTGATSFVGTHLLHSLIKEGYSIIALKRPITEPTIINTLIEWLNIQDIEKICQSSMNIHAIVHIATDYGRNRTPISEQYKCNVLLPTRLLELMPALKTKFFISTDSFFGKYEKHYGYMRSYMASKRHFVELSKIYVEEHPDVCFINLRLEHVYGERDKAGKIIPYVIKKMKNNEDIDCTIARQKRDFIYIDDVVSAYLKILKEGFNAGHYDVEVGTGKSIELKEVFEIIKKETHSSSKINYGAVAMRDDEIMESHANTSFLTRLGWSAEFSIEKGVKKMLSMKE

SEQ ID NO: 1471 - protein, 284 aa, Brucella abortus biovar; identical to SEQ ID NO: 1455

SEQ ID NO: 1472 - protein, 411 aa, Streptococcus pyogenes
MTAQTPIHVYSEIGKLKKVLLHRPGKEIENLMPDYLERLLFDDIPFLEDAQKEHDAFAQALRDEGIEVLYLETLAAESLVTPEIREAFIDEYLSEANIRGRATKKAIRELLMAIEDNQELIEKTMAGVQKSELPEIPASEKGLTDLVESNYPFAIDPMPNLYFTRDPFATIGTGVSLNHMFSETRNRETLYGKYIFTHHPIYGGGKVPMVYDRNETTRIEGGDELVLSKDVLAVGISQRTDAASIEKLLVNIFKQNLGFKKVLAFEFANNRKFMHLDTVFTMVDYDKFTIHPEIEGDLRVYSVTYDNEELHIVEEKGDLAELLAANLGVEKVDLIRCGGDNLVAAGREQWNDGSNTLTIAPGVVVVYNRNTITNAILESKGLKLIKIHGSELVRGRGGPRCMSMPFEREDI

SEQ ID NO: 1473 - protein, 450 aa, Escherichia coli
MSLLQFSGLFVVWLLCTLFIATLTWFEFRRVRFNFNVFFSLLFLLTFFFGFPLTSVLVFRFDVGVAPPEILLQALLSAGCFYAVYYVTYKTRLRKRVADVPRRPLFTMNRVETNLTWVILMGIALVSVGIFFMHNGFLLFRLNSYSQIFSSEVSGVALKRFFYFFIPAMLVVYFLRQDSKAWLFFLVSTVAFGLLTYMIVGGTRANIIIAFAIFLFIGIIRGWISLWMLAAAGVLGIVGMFWLALKRYGMNVSGDEAFYTFLYLTRDTFSPWENLALLLQNYDNIDFQGLAPIVRDFYVFIPSWLWPGRPSMVLNSANYFTWEVLNNHSGLAISPTLIGSLVVMGGALFIPLGAIVVGLIIKWFDWLYELGNREPNRYKAAILHSFCFGAIFNMIVLAREGLDSFVSRVVFFIVVFGACLMIAKLLYWLFESAGLIHKRTKSSLRTQVEG

SEQ ID NO: 1474 - protein, 273 aa, Borrelia burgdorferi
MKKYLLGIGLILALIACKQNVSSLDEKNSVSVDLPGEMKVLVSKEKNKDGKYDLIATVDKLELKGTSDKNNGSGVLEGVKADKSKVKLTISDDLGQTTLEVFKEDGKTLVSKKVTSKDKSSTEEKFNEKGEVSEKIITRADGTRLEYTGIKSDGSGKAKEVLKGYVLEGTLTAEKTTLVVKEGTVTLSKNISKSGEVSVELNDTDSSAATKKTAAWNSGTSTLTITVNSKKTKDLVFTKENTITVQQYDSNGTKLEGSAVEITKLDEIKNALK

SEQ ID NO: 1475 - protein, 382 aa, Bacillus subtilis
MNTNKRVLILTANYGNGHVQVAKTLYEQCVRLGFQHVTVSNLYQESNPIVSEVTQYLYLKSFSIGKQFYRLFYYGVDKIYNKRKFNIYFKMGNKRLGELVDEHQPDIIINTFPMIVVPEYRRRTGRVIPTFNVMTDFCLHKIWVHENVDKYYVATDYVKEKLLEIGTHPSNVKITGIPIRPQFEESMPVGPIYKKYNLSPNKKVLLIMAGAHGVLKNVKELCENLVKDDQVQVVVVCGKNTALKESLSALEAENGDKLKVLGYVERIDELFRITDCMITKPGGITLTEATAIGVPVILYKPVPGQEKENANFFEDRGAAIVVNRHEEILESVTSLLADEDTLHRMKKNIKDLHLANSSEVILEDILKESEMMTAKQKAKVLS

SEQ ID NO: 1476 - protein, 353 aa, Treponema pallidum
MREKWVRAFAGVFCAMLLIGCSKSDRPQMGNAGGAEGGDFVVGMVTDSGDIDDKSFNQQVWEGISRFAQENNAKCKYVTASTDAEYVPSLSAFADENMGLVVACGSFLVEAVIETSARFPKQKFLVIDAVVQDRDNVVSAVFGQNEGSFLVGVAAALKAKEAGKSAVGFIVGMELGMMPLFEAGFEAGVKAVDPDIQVVVEVANTFSDPQKGQALAAKLYDSGVNVIFQVAGGTGNGVIKEARDRRLNGQDVWVIGVDRDQYMDGVYDGSKSVVLTSMVKRADVAAERISKMAYDGSFPGGQSIMFGLEDKAVGIPEENPNLSSAVMEKIRSFEEKIVSKEIVVPVRSARMMN

SEQ ID NO: 1477 - protein, 425 aa, Salmonella typhi
MFGIDEVKIAIIGLGYVGLPLAVEFGKSRQVVGFDVNKKRILELKNGVDVNLETTEEELREARYLKFTSEIEKIKECNFYIITVPTPINTYKQPDLTPLIKASETVGTVLNRGDIVVYESTVYPGCTEEECVPILARMSGMTFNQDFYVGYSPERINPGDKKHRLTNIKKITSGSTAQIAELIDEVYQQIISAGTYKAESIKVAEAAKVIENTQRDLNIALVNELAIIFNRLNIDTEAVLRAAGSKWNFLPFRPGLVGGHCIGVDPYYLTHKSQGIGYYPEIILAGRRLNDNMGNYVSEQLIKAMIKKGINVEGSSVLILGFTFKENCPDIRNTRIIDVVKELGKYSCKVDIFDPWVDAEEVRREYGIIPVSEVKSSHYDAIIVAVGHQQFKQMGSEDIRGFGKDKHVLYDLKYVLPAEQSDVRL

SEQ ID NO: 1478 - protein, 159 aa, Rickettsia conorii
MKLLSKIMIIALATSMLQACNGPGGMNKQGTGTLLGGAGGALLGSQFGKGKGQLVGVGVGALLGAVLGGQIGAGMDEQDRRLAELTSQRALETAPSGSNVEWRNPDNGNYGYVTPNKTYRNSTGQYCREYTQTVVIGGKQQKAYGNACRQPDGQWQVVN

SEQ ID NO: 1479 - protein, 246 aa, Escherichia coli
MNNNTTAPTYTLRGLQLIGWRDMQHALDYLFADGHLKQGTLVAINAEKMLTIEDNAEVRELINAAEFKYADGISVVRSVRKKYPQAQVSRVAGADLWEELMARAGKEGTPVFLVGGKPEVLAQTEAKLRNQWNVNIVGSQDGYFKPEQRQALFERIHASGAQIVTVAMGSPKQEIFMRDCRLVHPDALYMGVGGTYDVFTGHVKRAPKIWQTLGLEWLYRLLSQPSRIKRQLRLLRYLRWHYTGNL

SEQ ID NO: 1480 - protein, 505 aa, Salmonella dublin
MAQVINTNSLSLLTQNNLNKSQSSLSSAIERLSSGLRINSAKDDAAGQAIANRFTSNIKGLTQASRNANDGISIAQTTEGALNEINNNLQRVRELSVQATNGTNSDSDLKSIQDEIQQRLEEIDRVSNQTQFNGVKVLSQDNQMKIQVGANDGETITIDLQKIDVKSLGLDGFNVNGPKEATVGDLKSSFKNVTGYDTYAAGADKYRVDINSGAVVTDAVAPDKVYVNAANGQLTTDDAENNTAVDLFKTTKSTAGTAEAKAIAGAIKGGKEGDTFDYKGVTFTIDTKTGDDGNGKVSTTINGEKVTLTVADIAIGAADVNAATLQSSKNVYTSVVNGQFTFDDKTKNESAKLSDLEANNAVKGESKITVNGAEYTANATGDKITLAGKTMFIDKTASGVSTLINEDAAAAKKSTANPLASIDSALSKVDAVRSSLGAIQNRFDSAITNLGNTVTNLNSARSRIEDADYATEVSNMSKAQILQQAGTSVLAQANQVPQNVLSLLR

SEQ ID NO: 1481 - protein, 175 aa, Staphylococcus aureus; identical to SEQ ID NO: 1257

SEQ ID NO: 1482 - protein, 236 aa, Mycobacterium tuberculosis
MRTPRRHCRRIAVLAAVSIAATVVAGCSSGSKPSGGPLPDAKPLVEEATAQTKALKSAHMVLTVNGKIPGLSLKTLSGDLTTNPTAATGNVKLTLGGSDIDADFVVFDGILYATLTPNQWSDFGPAADIYDPAQVLNPDTGLANVLANFADAKAEGRDTINGQNTIRISGKVSAQAVNQIAPPFNATQPVPATVWIQETGDHQLAQAQLDRGSGNSVQMTLSKWGEKVQVTKPPVS

SEQ ID NO: 1483 - protein, 314 aa, Vibrio cholerae
MIIVTGGAGMIGSNIIKALNERGITDILVVDHLKNGRKFKNLVDLQIADYMDRDDFLAQIMAGDDFGFIDAIFHEGACSATTEWDGKYVMLNNYEYSKELLHYCLDREIPFLYASSAATYGETDTFIEEPQYEGALNVYGYSKQQFDNYVRRLWLDAKQHDETLSQITGFRYFNVYGPREQHKGSMASVAFHLNNQMNAGENPKLFAGSENFKRDFVYVGDVAAVNLWFLDHGVSGIFNCGTGKAESFNEVAKAVIAFHGRGEVETIPFPDHLKGAYQEFTEADLTKLRAAGCDVQFKSVAEGVAEYMALINRK

SEQ ID NO: 1484 - protein, 152 aa, Coxiella burnetii
MKLILQEKVANLGNIGDQVVVKPGYARNFLLPLGKAVPATPEHIAEFEKQRAELEKAAAELLAKAKARAKKLEDKSFKITANASDEGRLFGSIGPREIAQAITEAGIEIEKREVDLSQGPIRQVGEYEVPLRLHTDVSVNVKIEVAPENSNS

SEQ ID NO: 1485 - protein, 452 aa, Salmonella typhi
MSLMQFSGLLVVWLLSTLFIATLTWFEFRRVRFNFNVFFSLLFLLTFFFGFPLTSVLVFRFDVGVAPPEILLQALLSAACFYGVYYVTYKTRLRKRVVDVPRKPLFTMNRVETHLTWVILMGIALVSVAIFFMHNGFLLFRLHSYSQIFSSEVSGVALKRFFYFFIPAMLVVYFLRQDSKAWLFFLVSTVAFGLLTYMIVGGTRANIIIAFAIFLFIGIIRGWISLWMLAAAGVLGIVGMFWLALKRYGLNVSGDEAFYTFLYLTRDTFSPWENLALLLQNYHNIDFQGLAPIVRDFYVFIPTWLWPGRPSIVLNSANYFTWEVLNNHSGLAISPTLIGSLVVMGGALFIPLGAIVVGLIIKWFDWLYELGNREPNRYKAAILHSFCFGAIFNMIVLAREGLDSFVSRVVFFLVVFGASLLVAKLLFWLFDSAGLIHKRTTSLPQAQMDGKL

SEQ ID NO: 1486 - protein, 299 aa, Salmonella typhimurium
MTFLKEYVIVSGASGFIGKHLLEALKKSGISVVAITRDVIKNNSNALANVRWCSWDNIELLVEELSIDSALIGIIHLATEYGHKTSSLINIEDANVIKPLKLLDLAIKYRADIFLNTDSFFAKKDFNYQHMRPYIITKRHFDEIGHYYANMHDISFVNMRLEHVYGPGDGENKFIPYIIDCLNKKQSCVKCTTGEQIRDFIFVDDVVNAYLTILENRKEVPSYTEYQVGTGAGVSLKDFLVYLQNTMMPGSSSIFEFGAIEQRDNEIMFSVANNKNLKAMGWKPNFDYKKGIEELLKRL

SEQ ID NO: 1487 - protein, 405 aa, Rickettsia prowazekii
MQYLILSLIFLIPSLGMLTGLSIAATVAFFLLSIIITGFISFIQKQEFNKKFFIKLYPRFGFDDIFCIINKIKTELLFTAWCFISCLFAVHPINSLVTFTKVFVLLFLRFVSNAVTFQNVLYIKNSLILGIITAILLFFIEYSSHGFLTRMFKTHFGLYMLDRGCALLSITTWVAIIILFSNGHNINSFILYIVVLYLLSISDSLASFLGFSIGGIIFILARLIKTIFFKLITISLITGSLLFPVIAKQIDPQNLSEKYLATQPSAAHRLFIWHFVANKIIIRPILGYGFASSKYIETGDNAMIDYRGEKLHPLPLHPHNNILQITLELGILGLALFLCLVYKYLKEIDNIKVSNFRAASYSCFINYYIIGMISYNIWQTWWILSGIWILVLMKLLVKPDIIIDN

SEQ ID NO: 1488 - protein, 1164 aa, Streptococcus agalactiae
MFKSNYERKMRYSIRKFSVGVASVAVASLFMGSVAHASELVKDDSVKTTEVAAKPYPSMAQTDQGNNSSSSELETTKMEIPTTDIKKAVEPVEKTAGETSATDTGKREKQLQQWKNNLKNDVDNTILSHEQKNEFKTKIDETNDSDALLELENQFNETNRLLHIKQHEEVEKDKKAKQQKTLKQSDTKVDLSNIDKELNHQKSQVEKMAEQKGITNEDKDSMLKKIEDIRKQAQQADKKEDAEVKVREELGKLFSSTKAGLDQEIQEHVKKETSSEENTQKVDEHYANSLQNLAQKSLEELDKATTNEQATQVKNQFLENAQKLKEIQPLIKETNVKLYKAMSESLEQVEKELKHNSEANLEDLVAKSKEIVREYEGKLNQSKNLPELKQLEEEAHSKLKQVVEDFRKKFKTSEQVTPKKRVKRDLAANENNQQKIELTVSPENITVYEGEDVKFTVTAKSDSKTTLDFSDLLTKYNPSVSDRISTNYKTNTDNHKIAEITIKNLKLNESQTVTLKAKDDSGNVVEKTFTITVQKKEEKQVPKTPEQKDSKTEEKVPQEPKSNDKNQLQELIKSAQQELEKLEKAIKELMEQPEIPSNPEYGIQKSIWESQKEPIQEAITSFKKIIGDSSSKYYTEHYFNKYKSDFMNYQLHAQMEMLTRKVVQYMNKYPDNAEIKKIFESDMKRTKEDNYGSLENDALKGYFEKYFLTPFNKIKQIVDDLDKKVEQDQPAPIPENSEMDQAKEKAKIAVSKYMSKVLDGVHQHLQKKNNSKIVDLFKELEAIKQQTIFDIDNAKTEVEIDNLVHDAFSKMNATVAKFQKGLETNTPETPDTPKIPELPQAPDTPQAPDTPHVPESPKAPEAPRVPESPKTPEAPHVPESPKAPEAPRVPESPKTPEAPHVPESPKTPEAPKIPEPPKTPDVPKLPDVPKLPDVPKLPDAPKLPDGLNKVGQAVFTSTDGNTKVTVVFDKPTDADKLHLKEVTTKELADKIAHKTGGGTVRVFDLSLSKGGKETHVNGERTVRLALGQTGSDVHVYHVKENGDLERIPSKVENGQVVFKTNHFSLFAIKTLSKDQNVTPPKQTKPSTQGSQVEIAESQTGKFQSKAANHKALATGNETVAKGNPTSTTEKKLPYTGVASNLVLEIMGLLGLIGTSFIAMKRRKS

SEQ ID NO: 1489 - protein, 325 aa, Escherichia coli
MRVENNNVSGQNLDPEQIDLIDLLVQLWRGKMTIIISVIVAIVLAIGYLVVAKEKWTSTAIVTQPDVGQIAGYNNAINVIYGSAAPKVSEIQSILIGRFSTTFSALAETLDNQEEPEKLTIEPTVKNQSLPLAVSYVGQSPEAAQKQLAQYIQQVDDQVNDELEKDLKDNIALRMKNLQDSLKTQEVVAQEQKELRIRQIQEALQYANQAQVTKPQIQQTQDVTQDTMFLLGSDALESMVKHEASRPLVFSSTYYQTRQNLLDIESLKVDDLDIHAYRYVMKPTLPIRRDSPKKAITLILAVLLGGMVGAGIVLGRNALRNYNAK

SEQ ID NO: 1490 - protein, 99 aa, Bacillus anthracis
MTVFVDHKIEYMSLEDDAELLKTMAHPMRLKIVNELYKHKALNVTQIIQILKLPQSTVSQHLCKMRGKVLKRNRQGLEIYYSINNPKVEGIIKLLNPIQ

SEQ ID NO: 1491 - protein, 391 aa, Staphylococcus aureus; identical to SEQ ID NO: 1331

SEQ ID NO: 1492 - protein, 417 aa, Treponema pallidum
MCMMGSVFSRKGMLCVLAVWCAASAAYPLRLRYKFRKGDTHRINSLIREDVFVNDTLAHTAEITNRITVHVSEVRVAHGSAPDAARYVCHFMTSEKSPNNTFRWGRHYESIFWRDAFGVYDIDRSFFMPVVRNVPVFPDYDIEVGDTWEHEAEEAHDLRDGFGIQTPFIVPFTVSYTYRGEVQRGSRRYHHITAAYSMSYESPKRTHGVQRNAKEGMYPVRTTGVSKQNLYWDNELGNIAEYDDEFRILLYLSGGTVLRYQGTATAKNFAPERFDPARTVVELQETLKDLHMPDAKVRETEEGVTISIENVQFDADSASLAPSEYEKLRKIAELLRAFPDRELLVSGHAARRGSVQDQQRISEERADVVARYLQELGVVDAAHVYTRGCGAQQSIAPNDSEDGRRKNRRVEITIISK

SEQ ID NO: 1493 - protein, 215 aa, Borrelia hermsii
MRKRISAIIMTLFMVLVSCNNGGPKLKSDEVAKSDGTVLALAKISKKIKDASDFATSVKEVHTLVKSIDELAKAIGKKIHNDGSLTTEDGKNGSLLAGVHSVISAVKTKLGSLEQKAIGEFAGMKVQVVAIKTASIDLLNKFKDKNAELGKNEVSNDDAKAAILVSNTTKDKGASELEALNTAIDGLLKAANGAVEAAITELTVPVKVEKPSQNN

SEQ ID NO: 1494 - protein, 159 aa, Rickettsia felis
MKLLSKIMIIALAASMLQACNGPGGMNKQGTGTLLGGAGGALLGSQFGKGKGQLVGVGVGALLGAVLGGQIGAGMDEQDRRLAELTSQRALEATPSGTSVEWRNPDNGNHGYVTPNKTYRNSTGQYCREYTQTVVIGGKQQKAYGNACRQPDGLWQVVN

SEQ ID NO: 1495 - protein, 246 aa, Yersinia pestis
MEPNTVIPKYNVRGFEIWGFRDMAQVLDHLLGSGPVKTGTLVAMNAEKLLKAEDDTALCELIKNAEYLYADGISMVRAIRRKYPQAELSRVAGADLWEALMQRAGQQGTPVFLVGGKPDVLAETEAKLRAQWNVNLVGSQDGYFTPEQREALFARIAASGAAIVTVAMGSPKQEIFMRDCRKFYPDALYMGVGGTYDVFTSHVKRAPKIWQNMGLEWLYRLLAQPSRIRRQLKLLKFVGYYYSGRL

SEQ ID NO: 1496 - protein, 508 aa, Salmonella oranienberg
MAQVINTNSLSLLTQNNLNKSQSSLSSAIERLSSGLRINSAKDDAAGQAIANRFTSNIKGLTQASRNANDGISIAQTTEGALNEINNNLQRVRELSVQATNGTNSDSDLKSIQDEIQQRLEEIDRVSNQTQFNGVKVLSQDNQMKIQVGANDGETITIDLQKIDVKSLGLDGFNVNGPKEATVGDLKSSFKNVTGYDTYAVGANKYRVDVNSGAVVTDTTAPTVPDKVYVNAANGQLTTADAQNNTAVDLFKSTKSAAGTDDAKAIATSIKGGKVGDTFDYKGVSFTIDTKAGDDGNGTVSTTINGEKVTLTISDIGASATDVNSAKIQSSKDVYTSVVSGQFTFADKTKNESAKLSDLEANNAVKGESKITVNGAEYTANAAGDKVTLAGKTMFIDKTASGVSTLINEDAAAAKKSTANPLASIDSALSKVDAVRSSLGAIQNRFDSAITNLGNTVTNLNSARSRIEDADYATEVSNMSKAQILQQAGTSVLAQANQVPQNVLSLLR

SEQ ID NO: 1497 - protein, 545 aa, Shigella flexneri
MLPINNNFSLPQNSFYNTISGTYADYFSAWDKWEKQALPGEERDEAVSRLKECLINNSDELRLDRLNLSSLPDNLPAQITLLNVSYNQLTNLPELPVTLKKLYSASNKLSELPVLPPALESLQVQHNELENLPALPDSLLTMNISYNEIVSLPSLPQALKNLRATRNFLTELPAFSEGNNPVVREYFFDRNQISHIPESILNLRNECSIHISDNPLSSHALPALQRLTSSPDYHGPRIYFSMSDGQQNTLHRPLADAVTAWFPENKQSDVSQIWHAFEHEEHANTFSAFLDRLSDTVSARNTSGFREQVAAWLEKLSASAELRQQSFAVAADATESCEDRVALTWNNLRKTLLVHQASEGLFDNDTGALLSLGREMFRLEILEDIARDKVRTLHFVDEIEVYLAFQTMLAEKLQLSTAVKEMRFYGVSGVTANDLRTAEAMVRSREENEFTDWFSLWGPWHAVLKRTEADRWAQAEEQKYEMLENEYPQRVADRLKASGLSGDADAEREAGAQVMRETEQQIYRQLTDEVLALRLPENGSQLHHS

SEQ ID NO: 1498 - protein, 4095 aa, Histophilus somni
MNKNCYKLIFSKTRGCLVPVAECITSAVDSGSSDSVVVSEKTDEEDRQGSIEDYRLSNVCLSVKTFLNPVSSALCLNWKSVSVLLLSMVAAPNFAQSAEEAAKAEKTPKLTEIQNGNDGIQLETKNQNIGVGAGTTENNHPTKLYKTENNVIVIDIAKPNDKGISDNRFQKFNIPNGAVFKNNKDQQRSELVGYLEGNKNLADKEAKVILNQVTGSELSQIKGALEILGTKADLVIANQHGINLNGVQTINAGRFVATTSKLIDPNKMEFDVTQGTVTIDVNGFATDNLPYLDIVAKKIEQKGTIGNKEKEKNKTSETEITFIAGKGKIKYNIENDGKTKLEVQKDSNTSQPSDKEEVAITGASTGAMHGKSIKLIVTEQGAGVKHDGIILSENDIKIESNKGDIDLGDKLQAKNEISLNNAKRITIANEITADKSITITADDVKLKNNKEASATEEAKLKGKGKLASKKVKVEAKKSLVLDDETKVVATDLELKSQTLTNQGRIYGNKVKIDTDKLVNKKEIYAEDNLDITTKGKTVTVSVNKDNKRKADVKEETVADLDVGFENTGTIESKSKAKLTFKDNTSFVSKGNKFIKAKDELTIDAQNVVISENDELQTTARLTINAAGNVVNNGLLASGKTLTINAKQGSIYNEKGILGAREQLTLSAKGNNKETEGNIINGADSLLHSEGKMELDAENTVYNLGNIFAKSDLTVKANELINDVKLSGSITKKSPYSVLNRYRRSDIASHGWHNNDYRLWINPIEFEKAEVKVEKAGLIRAEGNFKFEGKKGDNQQDATLTNHGVINVKNTFEAQNAKVVNNMKAYQANLLTEFFKQKQDITFNYQPRARLFLSALSGQAERKFNSLEELFDGLFSEQPITNSSSYYADNSQAVHLLEEIKSPTFQKAMTLVFGANWKNEDHKKLSQRWKEFKEKQDAHFDYRPTDKAKILAQRINGKIDELKNGSTGGFSESERITVGQHKFDLSKVEFRSEVNRKENLNNSNVDLSALSDLLSIPNLFVDNSVQLDKTVDKNIEIDEEDEFLLKPHTGEEPDLLNENELSENGKFLDKLLGEIGEKTYIREVSDDWERDPDEPDEPDYKTESRLETRDRFDTLPSEVQDKLRQKFNEYKEKAQQKRQAEALQAKTKNEQLQSDLETGYKEEEKRQAKNDLEKQAELQQLDQQEKEKLAKEKELQGKINEEKQQEALAKQKQEQQKQADAKAKIEEEKRLEEYRKELAKDHQIEEALSKNQFLKEVDDTRPKVETDPLYRTKLQYINQDEYFGSKYFLNKVGSSTDAGKKVAVIGDNYLEHQLITKSIEKKVDNHLALKYQVNDAQLVKKLIDNSYFESKELGLKVGEALTKEQQNQLKQDIVWYVKANINNKEVLLPQVYFANKTLRDAEKFKGLGDALIRANEINLKTRDVLNSGTISGKNIDIEAENKIKNRGDILSEESTRLVGHKGIDNTARSFVNGNGDVEVQRASIRTEGHLHLEADEDSDINSKGSDIKGKTGFVKARNFNTTDTHRTEHSVEKGRIFSKKGEILGYRKESTQKAISVGSNTEFDHVHFAIKNDVNQEGSKIKAKVVTGVVQGDYNTKAGRNAQQTERYIRLDQEYSSGHISGAGFTVSHERDSQNGEKTNIGGASSNTGTGFTLGGSFSETREKETSLTHTNSDLQVDHGILHVLKKAEIGGVDINKHKFTGKAVEEDEAKAEQQAKAKAAPDATDNAAQKEEPKFKVLSQSEVDDLMTEKSANDLFNKYKKVKEDEGFELSAKEITSNKQKDEYHLDSERSVLKFGIETEGHSAIADAVSHVAKEIVEAQRGVKQDGTVALQHISDVANIVTGELVGGSSKFGFERNYETNKVKETSDIRTKIAGNITLSAHGGNLQLKNVESDANSKLTLQAKRNVDILDGETTRESTERQSRQKFAFGINSGCSVMSGGCNGGVSGSVDGNESFTTEKSVTHNNSLLRAKNLKIAAGKDLNLISSNIKADHLDLNIKGKTNIVSKQDSFDRLYRGFDFSASAGAALSSSTLVKGNGSFGAGYTHEVENRKLLNQQAGIVANRITGQIKDLDLVAAHFINKDENSGFRVSGNVTSQQLNDSHHKDGGSVGVSVGINERGASSFNVRGGRAEQKHYDAVQKSVISGINLKDNNVTGEIVDDLSKAKTVTRDDVYASTQFNFEVADLVELGEKAKSKLQSKFSKAVNNDAEQPTTTRISSEDVVEMVDNPLYGSNADVRKLRTLDEVGEGYSTLGDQNANKGRKLPNGSDDIYSLLGKVKVSGDEPVYDKVSAEGAYDLLGDSNANKGRTLRNNSDDLYSTVGDANSDISRIRSNVYDEIAAGPYSLLGRTKAAEEHIYEQIGEGPYSLLGNGSAVRNRTLGGESNSTYSTVGDANSDISRIRSNVYDEIVAGPYSLLGKPKAAEEHIYEQIGEGPYSLLGNGSAVRNRTLGGESDSPYSTVGDANSDISRIRSNVYDEIVAGPYSLLGRTKAAEEHIYEQIGEGPYSLLGNGSAVRNRTLGGESDSPYSLLGGEGTRNKVLADTIESIYSTLSRPQASSNLEMVDNPLYDSVRRSASDQLPELPTVRNLLNSDTEAGNGTYSEITSRTRNANDPLPPLPNEFRTRLSQGADLADHVYDTIGSIYSVLSKPKASSNLEMVDNPLYGSVRRAAGDQLPELPTVKTLLNKVEEVGNEIYSEITSKTRSANDPLPALPNFRLTQEVDTADHIYADINDVVNRANKAKRDLPATPEATPKVAVDGGDYATIGEVSPLQPRASRQQGSSDYEEIPLPQETAPQKTSPVKRTSAEGEDGYATIAEVLQPRAAKGQVSDYETIPLDEPSQAAVRTERSAVEGDYAEITSPSIQPRSARGQSGGEEFEPFPSEFSSEPQSPKRALPAENAVVNELGNELKARLKSKEDQANPAKAEVSEPIYATLDKSPEGLARAKAKGDEAAAANPIVKTRVEDDVAPELPARPSNLSDSISNETIAENGQSVALGTPKSAVAESNRNNNGNQKLQSEGAEGVSPKTKSEDKSWFAKVKDFFFAKSNKSQAKEAKSEQETVSKPNYDSLEDDLNLKNLLALEDKRGSSFEENVLKNPEFLAEAREIAKKYIPEATIKQMGNSPEFDEILTEGAKKVEKRINDALTFKPSVDEFNEIQGLVKNIQKGSAVDDLNAQTLAITEALADTSKTIQRNPKLKEEVQGAIEEFLKSSQGKELTVEMIEKLNHGLRPDEGSDRLLYKKENLTKENAVFSSPQASKIQLNETVDFINQAIKQNVEPSVLAGLVYQRLIAYHPFAEGNGRMARVVVNKILLDAGYPPFTKFSSEFETQIIPQTKATAKSATSAEVVKEFLTELGKKSSPQEGGANNQNGQATSPVTLKSKDVSEVENTQSADSLTIKQPEQGKAGGQLPSVPKVETSVNEVAPLSSVPAELKDAAGGNKKAAEKSEGATGVEKEKTTLFQRVKQFFTGSKSGAKPVAGDETANKVNYQDLEDNLNLKGLISLEDDRNANFESNVLKNEKFLDEAREISKKSIPEATVKQMSHLPEFDDILTEGAKKVESRINKAITFRPSVEEFSEIQDLVKTLPKTKVIEDLSTKTNEITEALAATSKTIQRTPELKEQLKTAIEDFLQNSQGKPLTVQMIENLNHGLRPDEGEGRLLYKKENLTKENAVFSSPEAAKIQLAETVDFINRAKNEGIEPSVVGALVYQRLIAYHPFAEGNGRMARVIVNKILLDAGYPAFTKFSDEFEPQIIPQTKASTKSATSSEVVVEFLKELAKKGSKEDNEQNLEKTDRTSTDLTESAVENSAALSSGTVRSATVSETVTETEQAKAKPVSDLVSSKDLVEQQRTVLQRIQDQFQPLKVKSKIDAVRSSVEEFGGEVSFKFAQSKGEVYKEIVKHIETQNGVCESTCAHWIAKNVNPTDENFFNTLYEGGKKGHLKKETIDSIKKLQTEFINSGSATQQFKLTDSWLQEQGVVPKEKKVADFVRRDEVSGTVSKNDVSSLVKAILDTGDDTAGVKKISINLEGGSHTVSAAVDGSKVTFFDPNFGEMTFPTHQQFENWLKNAFWQKSGYAGKQEGRRFFNVVNYKKNN

SEQ ID NO: 1499 - protein, 364 aa, Escherichia coli
MKYIPVYQPSLTGKEKEYVNECLDSTWISSKGNYIQKFENKFAEQNHVQYATTVSNGTVALHLALLALGISEGDEVIVPTLTYIASVNAIKYTGATPIFVDSDNETWQMSVSDIEQKITNKTKAIMCVHLYGHPCDMEQIVELAKSRNLFVIEDCAEAFGSKYKGKYVGTFGDISTFSFFGNKTITTGEGGMVVTNDKTLYDRCLHFKGQGLAVHRQYWHDVIGYNYRMTNICAAIGLAQLEQADDFISRKREIADIYKKNINSLVQVHKESKDVFHTYWMVSILTRTAEEREELRNHLADKLIETRPVFYPVHTMPMYSEKYQKHPIAEDLGWRGINLPSFPSLSNEQVIYICESINEFYSDK

SEQ ID NO: 1500 - protein, 304 aa, Pseudomonas aeruginosa
MTQRLFVTGLSGFVGKHLQAYLAAAHTPWALLPVPHRYDLLEPDSLGDLWPELPDAVIHLAGQTYVPEAFRDPARTLQINLLGTLNLLQALKARGFSGTFLYISSGDVYGQVAEAALPIHEELIPHPRNPYAVSKLAAESLCLQWGITEGWRVLVARPFNHIGPGQKDSFVIASAARQIARMKQGLQANRLEVGDIDVSRDFLDVQDVLSAYLRLLSHGEAGAVYNVCSGQEQKIRELIELLADIAQVELEIVQDPARMRRAEQRRVRGSHARLHDTTGWKPEITIKQSLRAILSDWESRVREE

SEQ ID NO: 1501 - protein, 454 aa, Yersinia pseudotuberculosis
MTLGQFGGLFCIYLIAVIFILTLTYQEFRRVKFNFNVLFSMLYLLTFYFGFPLTCMLVFQFGVAVVPVEYLLYAMLSATAFYGIYYVTYKTRLRQPRSQPRTPIFTMNRVETNLTWVLLALVAVGTVGIFFMQNGFLLFKLDSYSKIFSSDVSGVALKRFFYFFIPAMLVVYFLKQDMRAWFFFLASTVAFGILTYVIVGGTRANIIIAFSLFLFIGIVRGWITLWMLAAAGVFGIVGMFWLALKRYGLDVNGAEAFYTFLYLTRDTFSPWENLGLLLQNYDKIDFQGLAPIVRDFYVFIPSALWPERPDLVLNTANYFTWDVLDNHSGLAISPTLIGSLVVMGGVLFIPLGAIVVGLIIKWFDWLYEQGKAESNRYKAAILQSFCFGAVFNIIVLAREGLDSFVSRVVFFCVIFGACLVLAKLLYWLFDTAGLIKRQGIKSNRLSMPNAGNQL

SEQ ID NO: 1502 - protein, 419 aa, Escherichia coli
MLTSFKLHSLKPYTLKSSMILEIITYILCFFSMIIAFVDNTFSIKIYNITAIVCLLSLILRGRQENYNIKNLILPLSIFLIGLLDLIWYSAFKVDNSPFRATYHSYLNTAKIFIFGSFIVFLTLTSQLKSKKESVLYTLYSLSFLIAGYAMYINSIHENDRISFGVGTATGAAYSTMLIGIVSGVAILYTKKNHPFLFLLNSCAVLYVLALTQTRATLLLFPIICVAALIAYYNKSPKKFTSSIVLLIAILASIVIIFNKPIQNRYNEALNDLNSYTNANSVTSLGARLAMYEIGLNIFIKSPFSFRSAESRAESMNLLVAEHNRLRGALEFSNVHLHNEIIEAGSLKGLMGIFSTLFLYFSLFYIAYKKRALGLLILTLGIVGIGLSDVIIWARSIPIIIISAIVLLLVINNRNNTIN

SEQ ID NO: 1503 - protein, 656 aa, Salmonella typhi
MSLHSTFKKISPTTLLKQEDWEGLCLYFSQHPEKVRDSAGNEQNIILFAIACLRKDETDVGLTLLSDRVLTAKNGRDLLRRWVISPLASSQPDAVLQVVNKLLAVNVCQPEDVLLVASVLLKSKQYATVADLAEQAWLAFSGNSQIFALHLRTLVLMDKELQAISLARTQAQEVPPRGDMIATCLSFLNKSRLPEDHDLARALLPFFALERQESAGLAVDTLCAVGKYQEAIQTGESALARGLDGAALRRSLGLAYYQSGRSREAKLQAAEHWRHALQFNSDNVRIVTLYADALIRTGQNEKAIPLLQQSLATHPDLPYVRAMYARALRQVGQYTAASDEFVQLAREKGVTSKWNRYAAAALLQAGKTSEAESVFEHYIQARASHLPQSFEEGLLALDGQISAVNLPPERLDWAWEVAGRQSGIERDEWERRAKWGYLADNFLLDWLECRGEQADEPMYRLADISHVEQFFQRLQLDQRGCIIVSAHLGAMYAGPMILSLLEMNSKWVASTPGVLKGGYGERLISVSDKSEADVVRACMQTLHSGQSLVVAIDGALNLSAPTIDFFGQQITYSTFCSRLAWKMHLPTVFSVPIWKNRHIHFVLERMVDPLKFESQLSFTERWKENYLQCVTRILQSDPENLRLSGGIWRNIIRRDS

SEQ ID NO: 1504 - protein, 159 aa, Mycobacterium paratuberculosis
MQGDPEVLRLLNEQLTSELTAINQYFLHSKMQDNWGFTELAEHTRAESFDEMRHAEAITDRILLLDGLPNYQRLFSLRIGQTLREQFEADLAIEYEVMDRLKPAIILCREKQDSTTATLFEQIVADEEKHIDYLETQLELMDKLGVELYSAQCVSRPPS

SEQ ID NO: 1505 - protein, 450 aa, Escherichia coli; identical to SEQ ID NO: 1311

SEQ ID NO: 1506 - protein, 332 aa, Acholeplasma laidlawii
MKVLLYSQKQSMLKKSGIGRAFYHQKRALEAVGIEYTTDPKDTYDLVHVNIAHSNKIKKFRKKYPVIVHGHSTVQDFRRSFAFWRVIAPFFYKHLQNIYGIADLIITPTRYSKFLIESMHVVKSPVVALSNGIDLDAYEYKQENVDAFRKHFDLEPNQKVVIGVGLLFERKGIHDFIEVARTMPNVTFIWFGNLSKLATTHFIRKRIKNKPKNMIMPGYVDGAVIKGAFSGADCVFFPSYEETEGIVVLEGLASKTPVVLRDIPVYYDWLFHKEHVLKGHNNFEFSKLIEKVLHEDQTEMIENGYKIVQDRSIEKIGEGLKQAYQEVIKIKR

SEQ ID NO: 1507 - protein, 391 aa, Staphylococcus aureus; identical to SEQ ID NO: 1347

SEQ ID NO: 1508 - protein, 346 aa, Neisseria gonorrhoeae
MQTEGKKNILVTGGAGFIGSAVVRHIIQNTRDSVVNLDKLTYAGNLESLTDIADNPRYAFEQVDICDRAELDRVFAQYRPDAVMHLAAESHVDRAIGSAGEFIRTNIVGTFDLLEAARAYWQQMPSEKREAFRFHHISTDEVYGDLHGTDDLFTETTPYAPSSPYSASKAAADHLVRAWQRTYRLPSIVSNCSNNYGPRQFPEKLIPLMILNALSGKPLPVYGDGAQIRDWLFVEDHARALYQVVTEGVVGETYNIGGHNEKTNLEVVKTICALLEELAPEKPAGVARYEDLITFVQDRPGHDARYAVDAAKIRRDLGWLPLETFESGLRKTVQWYLDNKTRRQNA

SEQ ID NO: 1509 - protein, 354 aa, Pseudomonas aeruginosa
MKILTIIGARPQFIKASVVSKAIIEQQTLSEIIVHTGQHFDANMSEIFFEQLGIPKPDYQLDIHGGTHGQMTGRMLMEIEDVILKEKPHRVLVYGDTNSTLAGALAASKLHVPIAHIEAGLRSFNMRMPEEINRILTDQVSDILFCPTRVAIDNLKNEGFERKAAKIVNVGDVMQDSALFFAQRATSPIGLASQDGFILATLHRAENTDDPVRLTSIVEALNEIQINVAPVVLPLHPRTRGVIERLGLKLEVQVIDPVGYLEMIWLLQRSGLVLTDSGGVQKEAFFFGKPCVTMRDQTEWVELVTCGANVLVGAARDMIVESARTSLGKTIQDDGQLYGGGQASSRIAEYLAKL

SEQ ID NO: 1510 - protein, 159 aa, Rickettsia japonica
MKLLSKIMIIALATSMLQACNGPGGMNKQGTGTLLGGAGGALLGSQFGKGTGQLVGVGVGALLGAVLGGQIGAGMDEQDRRLAELTSQRALETAPSGSNVEWRNPDNGNYGYVTPNKTYRNSTGQYCREYTQTVVIGGKQQKAYGNACRQPDGQWQVVN

SEQ ID NO: 1511 - protein, 246 aa, Escherichia coli; identical to SEQ ID NO: 1479

SEQ ID NO: 1512 - protein, 495 aa, Salmonella typhimurium [sequence omitted]

SEQ ID NO: 1513 - protein, 580 aa, Shigella flexneri
MHNVSTTTTGFPLAKILTSTELGDNTIQAANDAANKLFSLTIADLTANQNINTTNAHSTSNILIPELKAPKSLNASSQLTLLIGNLIQILGEKSLTALTNKITAWKSQQQARQQKNLEFSDKINTLLSETEGLTRDYEKQINKLKNADSKIKDLENKINQIQTRLSELDPESPEKKKLSREEIQLTIKKDAAVKDRTLIEQKTLSIHSKLTDKSMQLEKEIDSFSAFSNTASAEQLSTQQKSLTGLASVTQLMATFIQLVGKNNEESLKNDLALFQSLQESRKTEMERKSDEYAAEVRKAEELNRVMGCVGKILGALLTIVSVVAAAFSGGASLALAAVGLALMVTDAIVQAATGNSFMEQALNPIMKAVIEPLIKLLSDAFTKMLEGLGVDSKKAKMIGSILGAIAGALVLVAAVVLVATVGKQAAAKLAENIGKIIGKTLTDLIPKFLKNFSSQLDDLITNAVARLNKFLGAAGDEVISKQIISTHLNQAVLLGESVNSATQAGGSVASAVFQNSASTNLADLTLSKYQVEQLSKYISEAIEKFGQLQEVIADLLASMSNSQANRTDVAKAILQQTTA

SEQ ID NO: 1514 - protein, 590 aa, Streptococcus pyogenes
MYYTSGNYEAFATPRKPEGVDQKSAYIVGTGLAGLAAAVFLIRDGHMAGERIHLFEELPLAGGSLDGIEKPHLGFVTRGGREMENHFECMWDMYRSIPSLEIPGASYLDEFYWLDKDDPNSSNCRLIHKRGNRVDDDGQYTLGKQSKELIHLIMKTEESLGDQTIEEFFSEDFFKSNFWVYWATMFAFEKWHSAVEMRRYAMRFIHHIDGLPDFTSLKFNKYNQYDSMVKPIIAYLESHDVDIQFDTKVTDIQVEQTAGKKVAKTIHMTVSGEAKAIELTPDDLVFVTNGSITESSTYGSHHEVAKPTKALGGSWNLWENLAAQSDDFGHPKVFYQDLPAESWFVSATATIKHPAIEPYIERLTHRDLHDGKVNTGGIITITDSNWMMSFAIHRQPHFKEQKENETTVWIYGLYSNSEGNYVHKKIEECTGQEITEEWLYHLGVPVDKIKDLASQEYINTVPVYMPYITSYFMPRVKGDRPKVIPDGSVNLAFIGNFAESPSRDTVFTTEYSIRTAMEAVYSFLNGERGIPQGFNSAYDIRELLKAFYYLNDKKAIKDMDLPIPALIEKIGHKKIKDTFIEELLKDANLM

SEQ ID NO: 1515 - protein, 1767 aa, Streptococcus pneumoniae
MNKGLFEKRCKYSIRKFSLGVASVMIGATFFGTSPVLADSVQSGSTANLPADLATALATAKENDGHDFEAPKVGEDQGSPEVTDGPKTEEELLALEKEKPAEEKPKEDKPAAAKPETPKTVTPEWQTVEKKEQQGTVTIREEKGVRYNQLSSTAQNDNAGKPALFEKKGLTVDANGNATVDLTFKDDSEKGKSRFGVFLKFKDTKNNVFVGYDKDGWFWEYKSPTTSTWYRGSRVAAPETGSTNRLSITLKSDGQLNASNNDVNLFDTVTLPAAVNDHLKNEKKILLKAGSYDDERTVVSVKTDNQEGVKTEDTPAEKETGPEVDDSKVTYDTIQSKVLKAVIDQAFPRVKEYSLNGHTLPGQVQQFNQVFINNHRITPEVTYKKINETTAEYLMKLRDDAHLINAEMTVRLQVVDNQLHFDVTKIVNHNQVTPGQKIDDERKLLSSISFLGNALVSVSSDQTGAKFDGATMSNNTHVSGDDHIDVTNPMKDLAKGYMYGFVSTDKLAAGVWSNSQNSYGGGSNDWTRLTAYKETVGNANYVGIHSSEWQWEKAYKGIVFPEYTKELPSAKVVITEDANADKKVDWQDGAIAYRSIMNNPQGWKKVKDITAYRIAMNFGSQAQNPFLMTLDGIKKINLHTDGLGQGVLLKGYGSEGHDSGHLNYADIGKRIGGVEDFKTLIEKAKKYGAHLGIHVNASETYPESKYFNEKILRKNPDGSYSYGWNWLDQGINIDAAYDLAHGRLARWEDLKKKLGDGLDFIYVDVWGNGQSGDNGAWATHVLAKEINKQGWRFAIEWGHGGEYDSTFHHWAADLTYGGYTNKGINSAITRFIRNHQKDAWVGDYRSYGGAANYPLLGGYSMKDFEGWQGRSDYNGYVTNLFAHDVMTKYFQHFTVSKWENGTPVTMTDNGSTYKWTPEMRVELVDADNNKVVVTRKSNDVNSPQYRERTVTLNGRVIQDGSAYLTPWNWDANGKKLSTDKEKMYYFNTQAGATTWTLPSDWAKSKVYLYKLTDQGKTEEQELTVKDGKITLDLLANQPYVLYRSKQTNPEMSWSEGMHIYDQGFNSGTLKHWTISGDASKAEIVKSQGANDMLRIQGNKEKVSLTQKLTGLKPNTKYAVYVGVDNRSNAKASITVNTGEKEVTTYTNKSLALNYVKAYAHNTRRNNATVDDTSYFQNMYAFFTTGSDVSNVTLTLSREAGDEATYFDEIRTFENNSSMYGDKHDTGKGTFKQDFENVAQGIFPFVVGGVEGVEDNRTHLSEKHDPYTQRGWNGKKVDDVIEGNWSLKTNGLVSRRNLVYQTIPQNFRFEAGKTYRVTFEYEAGSDNTYAFVVGKGEFQSGRRGTQASNLEMHELPNTWTDSKKAKKATFLVTGAETGDTWVGIYSTGNASNTRGDSGGNANFRGYNDFMMDNLQIEEITLTGKMLTENALKNYLPTVAMTNYTKESMDALKEAVFNLSQADDDISVEEARAEIAKIEALKNALVQKKTALVADDFASLTAPAQAQEGLANAFDGNLSSLWHTSWGGGDVGKPATMVLKEATEITGLRYVPRGSGSNGNLRDVKLVVTDESGKEHTFTATDWPDNNKPKDIDFGKTIKAKKIVLTGTKTYGDGGDKYQSAAELIFTRPQVAETPLDLSGYEAALAKAQKLTDKDNQEEVASVQASMKYATDNHLLTERMVEYFADYLNQLKDSATKPDAPTVEKPEFKLSSVASDQGKTPDYKQEIARPETPEQILPATGESQFDTALFLASVSLALSALFVVKTKKD

SEQ ID NO: 1516 - protein, 361 aa, Escherichia coli
MKILVTGGAGFIGSAVVRHIINNTQDSVVNVDKLTYAGNLESLAEISDSERYSFENADICDAEGDGLYFGQHQLDAVMHLAAESHVDRSITGPAAFIETNIVGTYVLLEAARNYWSGLDDEKKKNFRFHHISTDEVYGDLPHPDEVNSNETLQLFTETTAYAPSSPYSASKASSDHLVRAWKRTYGLPTIVSNCSNNYGPYHFPEKLIPLVILNALEGKALPIYGKGDQIRDWLYVEDHARALYTVVTEGKAGETYNIGGHNEKKNIDVVFTICDLLDEIVPKEKSYREQITYVADRPGHDRRYAIDADKISRELGWKPQETFESGIRKTVEWYLANTNWVENVKSGAYQSWIEQNYEGRQ

SEQ ID NO: 1517 - protein, 264 aa, Salmonella typhi
MNILKNNSYYFMKLITVCELIILLMSRDIKTRYNGNLLNYMMVLAVPLVWISITVISFQYLNRSVPISTDDISFVIAGILPYLLFRYTITATMRTHSFSTSLAVVSQVKKRHVIFSLAAIEFVNAVIIYIIISLINFLIFSRWEAQKPFLIFEGMVIAWLLGLSFGYFCDALSERFPLVYKAVPVMLRPMFLISAVFYTANELPYSLLSIFSWNPLLHANEIVREGMFEGYHSLYLEPFYPLAFSATLFLAGLIFHLICDTENH

SEQ ID NO: 1518 - protein, 453 aa, Escherichia coli
MLTCFKAYDIRGKLGEELNEDIAWRIGRAYGEFLKPKTIVLGGDVRLTSETLKLALAKGLQDAGVDVLDIGMSGTEEIYFATFHLGVDGGIEVTASHNPMDYNGMKLVREGARPISGDTGLRDVQRLAEANDFPPVDETKRGRYQQINLRDAYVDHLFGYINVKNLTPLKLVINSGNGAAGPVVDAIEARFKALGAPVELIKVHNTPDGNFPNGIPNPLLPECRDDTRNAVIKHGADMGIAFDGDFDRCFLFDEKGQFIEGYYIVGLLAEAFLEKNPGAKIIHDPRLSWNTVDVVTAAGTPVMSKTGHAFIKERMRKEDAIYGGEMSAHHYFRDFAYCDTGMIPWLLVAELVCLKGKTLGELVRDRMAAFPASGEINSKLAHPVEAINRVEQHFSRDAGGGSHRWHQHDLCRLAALTCASSNTEPVVRLNVESRGDVPLMEEKTKLILELLNK

SEQ ID NO: 1519 - protein, 215 aa, Borrelia hermsii
MRKRISAIIMTLFMVFMSCNNGGPELKSDEVAKSDGTVLDLAKVSKKIKEASAFAASVKEVETLVKSVDELAKAIGKKIKNDDDGFDTEANKNGSLLAGTLQLMFAVGTKLESLEKIAGISDEVRGKVIVVKTENTALITKLKGGDASLGKNDASDSDAKNAIDKSDVTGGKVRKSLFKLNTAVDALLKAAEGEVEAAIKELTAPVKVEKPSQNN

SEQ ID NO: 1520 - protein, 337 aa, Borreliella bavariensis
MNKLLLLILFECIIFLSCSGKGSLESEIPKVSLIIDGTFDDKSFNESALNGIKKVKEEFKIEPVLKESSTNSYLSDLEGLKDTGSNLIWLIGYKFSDVAKSVSLQNPEIKYAIIDPVYSDEPIPANLVGMTFRSQEGAFLTGYIAAKVSKTGKIGFLGGIEGEIVDAFRYGYEAGAKYANKDIKISAYYIGSFADLEAGRSVATKMYSDGIDIIHHAAGLGGIGAIEVAKELGSGHYIIGVDGDQSYLAPNNIITSATKDVGRSLNIFTSNYLKTNTFEGGRLINYGLKEGVVGFIKNPKMIPFELEKEIDNLSSKIINQEIIVPYNKESYEKFIKE

SEQ ID NO: 1521 - protein, 450 aa, Escherichia fergusonii
MSLLQFSGLFVVWLLCTLFIATLTWFEFRRVRFNFNVFFSLLFLLTFFFGFPLTSVLVFRFDVGVAPPEILLQALLSAGCFYAVYYVTYKTRLRKRTTDVPRRPLFTMNRVETNLTWVILMGIALVSVGIFFMHNGFLLFRLNSYSQIFSSEVSGVALKRFFYFFIPAMLVVYFLRQDSKAWLFFLVSTVAFGLLTYMIVGGTRANIIIAFAIFLFIGIIRGWISLWMLAAAGVLGIVGMFWLALKRYGMNVSGDEAFYTFLYLTRDTFSPWENLALLLQNYDNIDFQGLAPIVRDFYVFIPSWLWPGRPSMVLNSANYFTWEVLNNHSGLAISPTLIGSLVVMGGALFIPLGAIVVGLIIKWFDWLYELGNRETNRYKAAILHSFCFGAIFNMIVLAREGLDSFVSRVVFFIVVFGACLMIAKLLYWLFESAGLIHKRTKSSLRTQVEG

SEQ ID NO: 1522 - protein, 99 aa, Mycobacterium tuberculosis
MEKMSHDPIAADIGTQVSDNALHGVTAGSTALTSVTGLVPAGADEVSAQAATAFTSEGIQLLASNASAQDQLHRAGEAVQDVARTYSQIDDGAAGVFAE

SEQ ID NO: 1523 - protein, 391 aa, Staphylococcus aureus; identical to SEQ ID NO: 1331

SEQ ID NO: 1524 - protein, 355 aa, Neisseria meningitidis
MRKILVTGGAGFIGSAVVRHIIRNTRDAVVNVDKLTYAGNLESLTEVADNPRYAFEQVDICDRAELDRVFAQYRPDAVMHLAAESHVDRSIGSAGEFIQTNIVGTFNLLEAARAYWQQMPSEQHEAFRFHHISTDEVYGDLGGTDDLFTETAPYAPSSPYSASKASSDHLVRAWLRTYGLPTIVTNCSNNYGPYHFPEKLIPLMILNALDGKPLPVYGDGMQIRDWLFVEDHARALYQVVTEGVVGETYNIGGHNEKANIEVVKTICALLEELAPEKPAGVARYEDLITFVQDRPGHDVRYAVDAAKIRRDLGWLPLETFESGLRKTVQWYLDNKTWWQNVLNGSYRLERLGTGK

SEQ ID NO: 1525 - protein, 330 aa, Escherichia coli
MYFLNDLNFSRRDAGFKARKDALDIASDYENISVVNIPLWGGVVQRIISSVKLSTFLCGLENKDVLIFNFPMAKPFWHILSFFHRLLKFRIVPLIHDIDELRGGGGSDSVRLATCDMVISHNPQMTKYLSKYMSQDKIKDIKIFDYLVSSDVEHRDVTDKQRGVIYAGNLSRHKCSFIYTEGCDFTLFGVNYENKDNPKYLGSFDAQSPEKINLPGMQFGLIWDGDSVETCSGAFGDYLKFNNPHKTSLYLSMELPVFIWDKAALADFIVDNRIGYAVGSIKEMQEIVDSMTIETYKQISENTKIISQKIRTGSYFRDVLEEVIDDLKTR

SEQ ID NO: 1526 - protein, 139 aa, Mycobacterium marinum
PTGSGVVGLSMAGSSALILAAYHPDQFVYSGSLSALLDPSQGMGPSLIGLAMGDAGGYKASDMWGPKDDPAWARNDPMLQVGKLVANNTRIWVYCGNGKPSDLGGDNLPAKFLEGFVRTSNMKFQAAYNAAGGHNAVWN

SEQ ID NO: 1527 - protein, 367 aa, Salmonella typhimurium
MKLLTALSELISIFLFTTIFIFLARKVAIKIGLVDKPNFRKRHQGVIPLVGGISVFAGICFMFGLSDYYIPHLSLYLICAGVLVFVGAMDDRFDISVKIRAVVQAVIAVVMMVIAKLHLGSLGYIFGPWELVLGPFGYFLTLFAVWAAINAFNMVDGIDGLLGGLSSVSFAAMGLILWFDGQTSLAMWCFAMIAAILPYIMLNLGILGRRYKVFMGDAGSTLIGFTVIWLLLETTQGKTHSISPVTALWIIAIPLMDMVAIMYRRLRKGMSPFSPDRQHIHHLVMRAGFTSRQAFVLITLAAAILAGVGVTAEYSHFVPEWVMLVLFLLAFFLYGYCIKRAWKVARFIKRVKRRLRRQRENRPNLTK

SEQ ID NO: 1528 - protein, 297 aa, Salmonella typhimurium
MMNLKAVIPVAGLGMHMLPATKAIPKEMLPIVDKPMIQYIVDEIVAAGIKEIVLVTHASKNAVENHFDTSYELESLLEQRVKRQLLAEVQSICPPGVTIMNVRQAQPLGLGHSILCARPVVGDNPFIVVLPDIIIDDATADPLRYNLAAMVARFNETGRSQVLAKRMKGDLSEYSVIQTKEPLDNEGKVSRIVEFIEKPDQPQTLDSDLMAVGRYVLSADIWAELERTEPGAWGRIQLTDAIAELAKKQSVDAMLMTGDSYDCGKKMGYMQAFVKYGLRNLKEGAKFRKSIEQLLHE

SEQ ID NO: 1529 - protein, 363 aa, Shigella dysenteriae
MEIQNTKSTQILYTDISTKQTQSSSETQKSQNYQQIAAHIPLNVGKNPVLTTTLNDDQLLKLSEQVQHDSEIIARLTDKKMKDLSEMSHTLTPENTLDISSLSSNAVSLIISVAVLLSALRTAETKLGSQLSLIAFDATKSAAENIVRQGLAALSSSITGAVTQVGITGIGAKKTHSGISDQKGALRKNLATAQSLEKELAGSKLGLNKQIDTNITSPQTNSSTKFLGKNKLAPDNISLSTEHKTSLSSPDISLQDKIDTQRRTYELNTLSAQQKQNIGRATMETSAVAGNISTSGGRYASALEEEEQLISQASSKQAEEASQVSKEASQATNQLIQKLLNIIDNINQSRSSTASQIAGNIRA

SEQ ID NO: 1530 - protein, 260 aa, Mycobacterium tuberculosis
MPLTPADVHNVAFSKPPIGKRGYNEDEVDAFLDLVENELTRLIEENSDLRQRINELDQELAAGGGAGVTPQATQAIPAYEPEPGKPAPAAVSAGMNEEQALKAARVLSLAQDTADRLTNTAKAESDKMLADARANAEQILGEARHTADATVAEARQRADAMLADAQSRSEAQLRQAQEKADALQADAERKHSEIMGTINQQRAVLEGRLEQLRTFEREYRTRLKTYLESQLEELGQRGSAAPVDSNADAGGFDQFNRGKN

SEQ ID NO: 1531 - protein, 595 aa, Bacteroides fragilis
MKTILLFALSLLLSLSVSDVCAQERVYDISQFGLKANSKKNASPVVRKAIAKIKAECRDGEKVILRFPAGRYNFHEAGSTVREYYISNHDQDNPKKVGIALEDMKNLTIDGQGSEFVFYGRMIPVSLLRSENCVLKNFSIDFEQPHIAQVQVVENDPEKGITFEPAPWVDYRISKDSVFEGLGEGWVMRYSWGIAFDGKTKHVVYNTSDIGCPTKGAFEVAPRRICSPKWKDARLVPGTVVAMRGWGRPTPGIFMSHDVNTSLLDVKVHYAEGMGLLAQLCEDITLDGFGVCLKGDNDPRYFTTQADATHFSGCKGKIVSKNGLYEGMMDDAINVHGTYLKVIKRVDDHTLIGRYMHDQSWGFEWGRPGDDVQFVRSETMELIGKQNQITAIRPYDKGEIRGAREFSITFKEAIDPAINEKSGFGIENLTWTPEVLFAGNTIRNNRARGTLFSTPKKTVVEDNLFDHTSGTAILLCGDCNGWFETGACRDVTIRRNRFINALTNMFQFTNAVISIYPEIPNLKDQQKYFHGGKDGGIVIEDNEFDTFDAPILYAKSVDGLIFRNNVIKTNTEFKPFHWNKDRFLLERVTNVKISE

SEQ ID NO: 1532 - protein, 185 aa, Escherichia coli
MNVIRTEIEDVLILEPRVFGDDRGFFYESFNQSAFEHILGYPVSFVQDNHSRSSKNVLRGLHFQRGEYAQDKLVRCTHGAVFDVAVDIRPNSVSFGKWVGVLLSADNKQQLWIPKGFAHGFLVLSDIAEFQYKTTNYYHPESDCGICWNDERIAIDWPQTSGLILSPKDERLFTLDELIRLKLIA

SEQ ID NO: 1533 - protein, 231 aa, Salmonella typhi
MFGLLGCTRYFESDKGPRVVLDKTDFVMGYHEHIGILAAPGSGKTTLTRLLCGLDAPDEGDFIGLRGDALPLGANSFILPGLTGEENARMMASLYGLDGDEFSHFCYQLTQLEQCYTDRVSEYSVTMKTHLAFAINLLLPCRLYIADGKLYTGDNATQLRMQAALACQLQQKGLIVLTHNPRLIKEHCHAFGVLLHGKITMCEDLAQATALFEQYQSNQATIQTEDYSFDI

SEQ ID NO: 1534 - protein, 456 aa, Escherichia coli
MTQLTCFKAYDIRGELGEELNEDIAYRIGRAYGEFLKPGKIVVGGDVRLTSESLKLALARGLMDAGTDVLDIGLSGTEEIYFATFHLGVDGGIEVTASHNPMNYNGMKLVRENAKPISGDTGLRDIQRLAEENQFPPVDPARRGTLRQISVLKEYVDHLMGYVDLANFTRPLKLVVNSGNGAAGHVIDEVEKRFAAAGVPVTFIKVHHQPDGHFPNGIPNPLLPECRQDTADAVREHQADMGIAFDGDFDRCFLFDDEASFIEGYYIVGLLAEAFLQKQPGAKIIHDPRLTWNTVDIVTRNGGQPVMSKTGHAFIKERMRQEDAIYGGEMSAHHYFRDFAYCDSGMIPWLLVAELLCLKNSSLKSLVADRQAAFPASGEINRKLGNAAEAIARIRAQYEPAAAHIDTTDGISIEYPEWRFNLRTSNTEPVVRLNVESRADTALMNAKTEEILALLK

SEQ ID NO: 1535 - protein, 914 aa, Mycobacterium bovis
MSFVIAVPETIAAAATDLADLGSTIAGANAAAAANTTSLLAAGADEISAAIAALFGAHGRAYQAASAEAAAFHGRFVQALTTGGGAYAAAEAAAVTPLLNSINAPVLAATGRPLIGNGANGAPGTGANGGDAGWLIGNGGAGGSGAKGANGGAGGPGGAAGLFGNGGAGGAGGTATANNGIGGAGGAGGSAMLFGAGGAGGAGGAATSLVGGIGGTGGTGGNAGMLAGAAGAGGAGGFSFSTAGGAGGAGGAGGLFTTGGVGGAGGQGHTGGAGGAGGAGGLFGAGGMGGAGGFGDHGTLGTGGAGGDGGGGGLFGAGGDGGAGGSGLTTGGAAGNGGNAGTLSLGAAGGAGGTGGAGGTVFGGGKGGAGGAGGNAGMLFGSGGGGGTGGFGFAAGGQGGVGGSAGMLSGSGGSGGAGGSGGPAGTAAGGAGGAGGAPGLIGNGGNGGNGGESGGTGGVGGAGGNAVLIGNGGEGGIGALAGKSGFGGFGGLLLGADGYNAPESTSPWHNLQQDILSFINEPTEALTGRPLIGNGDSGTPGTGDDGGAGGWLFGNGGNGGAGAAGTNGSAGGAGGAGGILFGTGGAGGAGGVGTAGAGGAGGAGGSAFLIGSGGTGGVGGAATTTGGVGGAGGNAGLLIGAAGLGGCGGGAFTAGVTTGGAGGTGGAAGLFANGGAGGAGGTGSTAGGAGGAGGAGGLYAHGGTGGPGGNGGSTGAGGTGGAGGPGGLYGAGGSGGAGGHGGMAGGGGGVGGNAGSLTLNASGGAGGSGGSSLSGKAGAGGAGGSAGLFYGSGGAGGNGGYSLNGTGGDGGTGGAGQITGLRSGFGGAGGAGGASDTGAGGNGGAGGKAGLYGNGGDGGAGGDGATSGKGGAGGNAVVIGNGGNGGNAGKAGGTAGAGGAGGLVLGRDGQHGLT

SEQ ID NO: 1536 - protein, 127 aa, Yersinia pestis
MRKIPIIAGVFSLLITSCTFAASLQDDMNILIANLGIVSSSTDTKVITSSLEKMRNAALDAQKAIPPKLEGKAEDSPEIKDYRHGFDLLIEQIDKTKQWAEEGNIQEVKKSVGEVINIRNTYHSRYR

SEQ ID NO: 1537 - protein, 325 aa, Shigella dysenteriae
MRVENNNVSGQNHDPEQIDLIDLLVQLWRGKMTIIISVIVAIALAIGYLAVAKEKWTSTAIVTQPDVGQIAGYNNAMNVIYGQATPKVSDLQETLIGRFSSAFSALAETLDNQEEPEKLTIEPSVKNQQLPLTVSYVGQTAEGAQMKLAQYIQQVDDKVNQELEKDLKDNIALGRKNLQDSLRTQEVVAQEQKDLRIRQIQEALQYANQAQVTKPQVQQTEDVTQDTLFLLGSEALESMIKHEATRPLVFSPSYYQTRQNLLDIENLKVDDLDIHAYRYVMKPTLPIRRDSPKKAITLILAVLLGGMVGAGIVLGRNALRNYNAK

SEQ ID NO: 1538 - protein, 1645 aa, Rickettsia typhi
MAQKPNFLKKIISAGLVTASTATIVAGFSGVAMGAVMQYNRTTNAAATTVDGAGFDQTGAGVNLPVATNSVITANSNNAITFNTPNGNLNSLFLDTANTLAVTINENTTLGFVTNVTKQGNFFNFTIGAGKSLTITGHGITAQQAATTKSAQNVVSKVNAGAAINDNDLSGVGSIDFTAAPSVLEFNLINPTTQEAPLTLGDNAKIVNGANGILNITNGFVKVSDKTFAGIKTINIGDNQGLMFNTTPDAANALNLQGGGNTINFNGRDGTGKLVLVSKNGNATEFNVTGSLGGNLKGVIEFDTTAAAGKLIANGGAANAVIGTDNGAGRAAGFIVSVDNGNAATISGQVYAKDIVIQSANAGGQVTFEHLVDVGLGGKTNFKTADSKVIITENASFGSTDFGNLAVQIVVPNNKILTGNFIGDAKNNGNTAGVITFNANGTLVSGNTDPNIVVTNIKAIEVEGAGIVQLSGIHGAELRLGNAGSIFKLADGTVINGPVNQNPLVNNNALAAGSIQLDGSAIITGDIGNGAVNAALQDITLANDASKILTLSGANIIGANAGGAIHFQANGGTIQLTSTQNNILVDFDLDVTTDQTGVVDASSLTNNQTLTINGSIGTIGANTKTLGRFNVGSSKTILNAGDVAINELVMENDGSVHLTHNTYLITKTINAANQGKIIVAADPINTDTALADGTNLGSAESPLSNIHFATKAANGDSILHIGKGVNLYANNITTTDANVGSLHFRSGGTSIVSGTVGGQQGLKLNNLILDNGTTVKFLGDITFNGGTKIEGKSILQISSNYITDHIESADNTGTLEFVNTDPITVTLNKQGAYFGVLKQVMVSGPGNIAFNEIGNGVAHAIAVDSISFENASLGASLFLLSGTPLDVLTIKSTVGNGTVDNFNAPILVVSGIDSMINNGQVIGDQKNIIALSLGSDNSITVNSNTLYAGIRTTKTNQGTVTLSGGIPNNPGTIYGLGLENGDPKLKQVTFTTDYNNLGSIIATNVTINDDVTLTTGGIAGTDFDGKITLGSINGNANVKFVDRTFSHPTSMIVSTKANQGTVTYLGNALVGNIGSSDIPVASVRFTGNDSGVGLQGNIHSQNIDFGTYNLTILNSDVILGGGTTAINGEIDLLTNNLIFANGTSTWGNNTSLSTTLNVSNGNVGQIVIAEGAQVNATTTGTTTIKIQDNANANFSGTQTYTLIQGGARFNGTLGAPNFDVTGNNIFVKYELIRDANQDYVLTRTNDVLNVVTTAVGNSAIANAPGVHQNIAICLESTDTAAYNNMLLAKDSSDVATFIGAIATDTGAAVATVNLNDTQKTQDLLGNRLGALRYLSNSETADVGGSETGAVSSGDEAIDQVSYGVWAKPFYNIAEQDKKGGLAGYKAKTAGVVVGLDTLANDNLMIGAAIGITKTDIKHQDYKKGDKTDIKGLSFSLYGAQQLVKNFFAQGSAIFTLNKVKSKSQRYFFDANGKMNKQIAAGNYDNITFGGNLMFGYDYNALQGVLVTPMAGLSYLKSSNENYKETGTTVANKRIHSKFSDRIDLIVGAKVTGSAMNINDIVIYPEIHSFVVHKVNGKLSKAQSMLDGQTAPFISQPDRTAKTSYNIGLSANIRSDAKMEYGIGYDFNAASKYTAHQGTLKVRINF

SEQ ID NO: 1539 - protein, 391 aa, Staphylococcus epidermidis
MVTQNKKILIITGSFGNGHMQVTQSIVNQLNEMNLNHLSVIQHDLFMEAHPIMTSICKKWYINSFKYFRNTYKRFYYSRPNELDKCFYKYYGLNKLINLLIKEKPDLILLTFPTPVMSVLTEQFNINIPIATVMTDYRMHKNWITPYSQRYYVATKDTKDDFIEAGVPASYIKVTGIPIADKFEESIDKEEWLSQQHLDPSKPTILMSAGAFGVSKGFDYMINNILEKSPNSQVVMICGRSKELKRSLKAKFKDNPSVKILGYTNHMNEWMASSQLMITKPGGITISEGLSRCIPMIFLNPAPGQELENAYYFESKGFGKIADTPNEAIDIVSDLTNNEETLKVMSSKMLESKVGYSTRKICKDLLDLIGHSSQPDEIYGKVPLYARFFVK

SEQ ID NO: 1540 - protein, 361 aa, Salmonella typhimurium
MKILITGGAGFIGSAVVRHIIKNTQDTVVNIDKLTYAGNLESLSDISESNRYNFEHADICDSAEITRIFEQYQPDAVMHLAAESHVDRSITGPAAFIETNIVGTYALLEVARKYWSALGEDKKNNFRFHHISTDEVYGDLPHPDEVENSVTLPLFTETTAYAPSSPYSASKASSDHLVRAWRRTYGLPTIVTNCSNNYGPYHFPEKLIPLVILNALEGKPLPIYGKGDQIRDWLYVEDHARALHMVVTEGKAGETYNIGGHNEKKNLDVVFTICDLLDEIVPKATSYREQITYVADRPGHDRRYAIDAGKISRELGWKPLETFESGIRKTVEWYLANTQWVNNVKSGAYQSWIEQNYEGRQ

SEQ ID NO: 1541 - protein, 196 aa, Escherichia coli
MILKLAKRYGLCGFIRLVRDVLLTRVFYRNCRIIRFPCYIRNDGSINFGENFTSGVGLRLDAFGRGVIFFSDNVQVNDYVHIASIESVTIGRDTLIASKVFITDHNHGSFKHSDPMSSPNIPPDMRTLESSAVVIGQRVWLGENVTVLPGTIIGNGVVVGANSVVRGSIPENTVIAGVPAKIIKKYNHETKLWEKA

SEQ ID NO: 1542 - protein, 146 aa, Streptococcus pneumoniae
MRQLAKDINAFLNEVILQAENQHEILIGHCTSEVALTNTQEHILMLLSEESLTNSELARRLNVSQAAVTKAIKSLVKEGMLETSKDSKDARVIFYQLTDLARPIAEEHHHHHEHTLLTYEQVATQFTPNEQKVIQRFLTALVGEIK

SEQ ID NO: 1543 - protein, 246 aa, =Escherichia coli; identical to SEQ ID NO: 1265

SEQ ID NO: 1544 - protein, 302 aa, Shigella flexneri
MAAINTKVKKAVIPVAGLGTRMLPATKAIPKEMLPLVDKPLIQYVVNECIAAGITEIVLVTHSSKNSIENHFDTSFELEAMLEKRVKRQLLDEVQSICPPHVTIMQVRQGLAKGLGHAVLCAHPVVGDEPVAVILPDVILDEYESDLSQDNLAEMIRRFDETGHSQIMVEPVADVTAYGVVDCKGVELAPGESVPMVGVVEKPKADVAPSNLAIVGRYVLSADIWPLLAKTPPGAGDEIQLTDAIDMLIEKETVEAYHMKGKSHDCGNKLGYMQAFVEYGIRHNTLGTEFKAWLEEEMGIKK

SEQ ID NO: 1545 - protein, 233 aa, Staphylococcus aureus; identical to SEQ ID NO: 1369

SEQ ID NO: 1546 - protein, 1643 aa, Rickettsia prowazekii
MAQKPNFLKKIISAGLVTASTATIVAGFSGVAMGAAMQYNRTTNAAATTFDGIGFDQAAGANIPVAPNSVITANANNPITFNTPNGHLNSLFLDTANDLAVTINEDTTLGFITNIAQQAKFFNFTVAAGKILNITGQGITVQEASNTINAQNALTKVHGGAAINANDLSGLGSITFAAAPSVLEFNLINPTTQEAPLTLGANSKIVNGGNGTLNITNGFIQVSDNTFAGIKTINIDDCQGLMFNSTPDAANTLNLQVGGNTINFNGIDGTGKLVLVSKNGAATEFNVTGTLGGNLKGIIELNTAAVAGKLISQGGAANAVIGTDNGAGRAAGFIVSVDNGNAATISGQVYAKNMVIQSANAGGQVTFEHIVDVGLGGTTNFKTADSKVIITENSNFGSTNFGNLDTQIVVPDTKILKGNFIGDVKNNGNTAGVITFNANGALVSASTDPNIAVTNINAIEAEGAGVVELSGIHIAELRLGNGGSIFKLADGTVINGPVNQNALMNNNALAAGSIQLDGSAIITGDIGNGGVNAALQHITLANDASKILALDGANIIGANVGGAIHFQANGGTIKLTNTQNNIVVNFDLDITTDKTGVVDASSLTNNQTLTINGSIGTVVANTKTLAQLNIGSSKTILNAGDVAINELVIENNGSVQLNHNTYLITKTINAANQGQIIVAADPLNTNTTLADGTNLGSAENPLSTIHFATKAANADSILNVGKGVNLYANNITTNDANVGSLHFRSGGTSIVSGTVGGQQGHKLNNLILDNGTTVKFLGDTTFNGGTKIEGKSILQISNNYTTDHVESADNTGTLEFVNTDPITVTLNKQGAYFGVLKQVIISGPGNIVFNEIGNVGIVHGIAANSISFENASLGTSLFLPSGTPLDVLTIKSTVGNGTVDNFNAPIVVVSGIDSMINNGQIIGDKKNIIALSLGSDNSITVNANTLYSGIRTTKNNQGTVTLSGGMPNNPGTIYGLGLENGSPKLKQVTFTTDYNNLGSIIANNVTINDYVTLTTGGIAGTDFDAKITLGSVNGNANVRFVDSTFSDPRSMIVATQANKGTVTYLGNALVSNIGSLDTPVASVRFTGNDSGAGLQGNIYSQNIDFGTYNLTILNSNVILGGGTTAINGEIDLLTNNLIFANGTSTWGDNTSISTTLNVSSGNIGQVVIAEDAQVNATTTGTTTIKIQDNANANFSGTQAYTLIQGGARFNGTLGAPNFAVTGSNIFVKYELIRDSNQDYVLTRTNDVLNVVTTAVGNSAIANAPGVSQNISRCLESTNTAAYNNMLLAKDPSDVATFVGAIATDTSAAVTTVNLNDTQKTQDLLSNRLGTLRYLSNAETSDVAGSATGAVSSGDEAEVSYGVWAKPFYNIAEQDKKGGIAGYKAKTTGVVVGLDTLASDNLMIGAAIGITKTDIKHQDYKKGDKTDINGLSFSLYGSQQLVKNFFAQGNAIFTLNKVKSKSQRYFFESNGKMSKQIAAGNYDNMTFGGNLIFGYDYNAMPNVLVTPMAGLSYLKSSNENYKETGTTVANKRINSKFSDRVDLIVGAKVAGSTVNITDIVIYPEIHSFVVHKVNGKLSNSQSMLDGQTAPFISQPDRTAKTSYNIGLSANIKSDAKMEYGIGYDFNSASKYTAHQGTLKVRVNF

SEQ ID NO: 1547 - protein, 245 aa, Escherichia coli
MIIPALDLIDGTVVRLHQGDYGKQRDYGNDPLPRLQDYAAQGAEVLHLVDLTGAKDPAKRQIPLIKTLVAGVNVPVQVGGGVRSEEDVAALLEAGVARVVVGSTAVKSPEMVKGWFERFGADALVLALDVRIDEQGNKQVAVSGWQENSGVSLEQLVETYLPVGLKHVLCTDISRDGTLAGSNVSLYEEVCARYPQVAFQSSGGIGDINDVAALRGTGVRGVIVGRALLEGKFTVKEAISCWQNA

SEQ ID NO: 1548 - protein, 328 aa, Neisseria gonorrhoeae
MDIIDTALPDVKLLKPQVFTDGRGFFMETFRDGWFKENIADRTFVQENHSNSSKGVLRGLHYQTENTQGKLVRVVVGEVFDVAVDMREGSPTFGKWAGATLSAQNRYQLWIPEGFAHGFCVLGDAAEVVYKCTDYYNPETEQVLIWNDPAIGIGWPLQTAPLLSPKDLAGKTWAQAEKSALRFPDKKCRPNVSDGIFSDRLPTRLQYALCKEKHPGNEERQAQPRSGGIPVLQIQRERRIRAAVGHREGNNKRHNYTNQAFTDNQACREKRTDTVGVFQTAFAVFRLLANDVFQHRRQHRACHDGHIDGRRQINAHTDRKDGQGKFTA

SEQ ID NO: 1549 - protein, 321 aa, Bartonella henselae
MSDFSFSPFESISGYILQPLNNVMNTTVSGLSSAISAPLNLASIIFIFLYGYNVMTGRVALSMNSLLNNVVKIVIVTTMATNADTFNTYVKNIFFGDLANAIGNALNSNPSSANVFDYILLKTSARYQEVLAAAWFLEKIMVGLLGSLMIMAVIVFCIGGFIVQMFAQVALVMIIGLGPLFISLYLFNATRKFTDAWITTLVNFTILQVLVIMLGTIMCKIILYVLDGTYESIYFLFPPVVVISIVGAILFRALPGIASALSSGGPYFNAGISSGGQIFTMLSSGAKTGRNAAKSAASTLSGAAGTATKAAKIGGNGRGRF

SEQ ID NO: 1550 - protein, 477 aa, Salmonella typhimurium
MNVVNNSRDVIYSSGIVFGTSGARGLVKDFTPQVCAAFTVSFVAVMQEHFSFDTVALAIDNRPSSYGMAQACAAALADKGVNCIFYGVVPTPALAFQSMSDNMPAIMVTGSHIPFERNGLKFYRPDGEITKHDEAAILSVEDTCSHLELKELIVSEMAAVNYISRYTSLFSTPFLKNKRIGIYEHSSAGRDLYKPLFIALGAEVVSLGRSDNFVPIDTEAVSKEDREKARSWAKEFDLDAIFSTDGDGDRPLIADEAGEWLRGDILGLLCSLALDAEAVAIPVSCNSIISSGRFFKHVKLTKIGSPYVIEAFNELSRSYSRIVGFEANGGFLLGSDICINEQNLHALPTRDAVLPAIMLLYKSRNTSISALVNELPTRYTHSDRLQGITTDKSQSLISMGRENLSNLLSYIGLENEGAISTDMTDGMRITLRDGCIVHLRASGNAPELRCYAEANLLNRAQDLVNTTLANIKKRCLL

SEQ ID NO: 1551 - protein, 914 aa, Mycobacterium tuberculosis; identical to SEQ ID NO: 1535

SEQ ID NO: 1552 - protein, 620 aa, Burkholderia pseudomallei
MSSGVQGGPAANANAYQTHPLRDAASALGTLSPQAYVDVVSAAQRNFLERMSQLASEQCDAQPAAHDARLDDRPALRAPQERDAPPLGASDTGSRASGAAKLTELLGVLMSVISASSLDELKQRSDIWNQMSKAAQDNLSRLSDAFQRATDEAKAAADAAEQAAAAAKQAGADAKAADAAVDAAQKRYDDAVKQGLPDDRLQSLKAALEQARQQAGDAHGRADALQADATKKLDAASALATQARACEQQVDDAVNQATQQYGASASLRTPQSPRLSGAAELTAVLGKLQELISSGNVKELESKQKLFTEMQAKREAELQKKSDEYQAQVKKAEEMQKTMGCIGKIVGWVITAVSFAAAAFTGGASLALAAVGLALAVGDEISRATTGVSFMDKLMQPVMDAILKPLMEMISSLITKALVACGVDQQKAELAGAILGAVVTGVALVAAAFVGASAVKAVASKVIDAMAGQLTKLMDSAIGKMLVQLIEKFSEKSGLQALGSRTATAMTRMRRAIGVEAKEDGMLLANRFEKAGTVMNVGNQVSQAAGGIVVGVERAKAMGLLADVKEAMYDIKLLGDLLKQAVDAFAEHNRVLAQLMQQMSDAGEMQTSTGKLILRNARAV

SEQ ID NO: 1553 - protein, 325 aa, Shigella flexneri
MRVENNNVSGQNHDPEQIDLIDLLVQLWRGKMTIIISVIVAIALAIGYLAVAKEKWTSTAIITQPDVGQIAGYNNAMNVIYGQAAPKVSDLQETLIGRFSSAFSALAETLDNQEEPEKLTIEPSVKNQQLPLTVSYVGQTAEGAQMKLAQYIQQVDDKVNQELEKDLKDNIALGRKNLQDSLRTQEVVAQEQKDLRIRQIQEALQYANQAQVTKPQVQQTEDVTQDTLFLLGSEALESMIKHEATRPLVFSPNYYQTRQNLLDIEKLKFDDLDIHAYRYVMKPTLPIRRDSPKKAITLILAVLLGGMVGAGIVLGRNALRNYNAK

SEQ ID NO: 1554 - protein, 252 aa, Coxiella burnetii
METTTKLAIGVSALCCLASAAFAGGPDIPMIDMNGFHIGLGFGYKSYTYDQVGTVTVTTNGGTVLSVLHPVSASITQFGPVGELGYTFASDWWIAGVKAQYQYDNVRSVHIMDAPLVGSNYSYRTRLGSHLTAMLLAGIKVNEANAVYLEAGYSTVWGKTTLFGPGPVAVSMKNRLNGGIAGIGWRHYFMNNVFLDLSYDYALYRSKSNSVTLSSATASAEGTAIGVSGTVQNPKRVAINGITATVNYLFNI

SEQ ID NO: 1555 - protein, 388 aa, Bacillus thuringiensis
MIKNPKVLILTAHYGNGHVQVAKTLEQTFRQKGIKDVIVCDLFGESHPVITDITKYLYLKSYTIGKELYRLFYYGVEKIYDKKIASWYANFGRKRLKLLLQAEKPDIVINTFPIIAVPELKKQTGISIPVYNVLTDFCVHKIWIHREVDRYFVATDHVKKVMVDIGVPAEQIVETGIPIRSSFELKINPDIIYNKYQLCKNKKILLIVAGAHGVLGSVKELCQSFMSVPDLQVVVVCGKNEALKQDLVGVQETNPDALKVFGYVENIDELFRVTSCMITKPGGITLSEAAALQVPVILYKPVPGQENENAMYFERKGAAVVIRDDSEVFAKTEALLQDDMKLLQMKEAMKSIYRPEPADHIVDTILEENHVEPNHIPIKSPALAQSFT

SEQ ID NO: 1556 - protein, 351 aa, Xanthomonas campestris
MATWLVTGGAGFIGGNFVLEAVSRGIRVVNLDALTYAGNLNTLASLEGNADHIFVKGDIGDGALVTRLLQEHQPDAVLNFAAESHVDRSIEGPGAFIQTNVVGTLALLEAVRDYWKALPDTRRDAFRFLHVSTDEVYGTLGETGKFTETTPYAPNSPYSASKAASDHLVRAFHHTYGLPVLTTNCSNNYGPYHFPEKLIPLVIAKALAGEPLPVYGDGKQVRDWLFVSDHCEAIRTVLAKGRVGETYNVGGNSERQNIEVVQAICALLDQHRPREDGKPRESQIAYVTDRPGHDRRYAIDASKLKDELGWEPAYTFEQGIALTVDWYLTNQTWVQGVLDGSYRLERIGATV

SEQ ID NO: 1557 - protein, 464 aa, Escherichia coli
MTNLKKRERAKTNASLISMVQRFSDITIMFAGLWLVCEVSGLSFLYMHLLVALITLVVFQMLGGITDFYRSWRGVRAATEFALLLQNWTLSVIFSAGLVAFNNDFDTQLKIWLAWYALTSIGLVVCRSCIRIGAGWLRNHGYNKRMVAVAGDLAAGQMLMESFRNQPWLGFEVVGVYHDPKPGGVSNDWAGNLQQLVEDAKAGKIHNVYIAMQMCDGARVKKLVHQLADTTCSVLLIPDVFTFNILHSRLEEMNGVPVVPLYDTPLSGVNRLLKRAEDIVLATLILLLISPVLCCIALAVKLSSPGPVIFRQTRYGMDGKPIKVWKFRSMKVMENDKVVTQATQNDPRVTKVGNFLRRTSLDELPQFINVLTGGMSIVGPRPHAVAHNEQYRQLIEGYMLRHKVKPGITGWAQINGWRGETDTLEKMEKRVEFDLEYIREWSVWFDIKIVFLTVFKGFVNKAAY

SEQ ID NO: 1558 - protein, 144 aa, Mycobacterium bovis; identical to SEQ ID NO: 1322

SEQ ID NO: 1559 - protein, 359 aa, Salmonella dublin; identical to SEQ ID NO: 1297

SEQ ID NO: 1560 - protein, 869 aa, Escherichia coli
MKHKKKNRLVVAISVALIPYIGVTGDIPDSFRDLWGEQDEFYEVKLYGQTLGIHRIKTTPTHIKFYSPESILDKINLKKEKEKELSVFFTNSFSRNGNMSCQGNTTIQYNCNYIKTKSVDVIVDDVDNVVNLFIGNEFLDSEAHNDEYHQLSRNVKKAFIQSQTINLSDSGKYKRLSISGNSALGITDTSYAVLNWWMNYNKSNGYSNNEKTINSLYFRHDLDKRYYYQFGRMDRTDLSQSISGSFNFNLLPLPDIDGIRTGTTQSYIKNTDKFIASPVTVMLTNFSRVEAFRNDQLLGVWYLDSGVNELDTARLPYGSYDLKLKIFENTQLVREEIIPFNKGRSSIGDMQWDIFVQGGNIVNDNDRYIEKQNNHKSSINTGLRLPITKNISVQQGVSVIDNKSYYEGSLKWNSGILSGSLNSEFSFLWGDNAKGNYQSISYTDGFSLSFYHNDKRVDNCGRNYNAGWSGCYESYSASLSIPLLGWTSTLGYSDTYSESVYKSHILSEYGFYNQNIYKGRTQRWQLTSSTSLKWMDYNFMPAIGIYNSEQRQLTDKGGYISVTITRASRENSLNTGYSYNYSRGNYSSNELFVDGYMTSTNNGDYHEAGMRFNKNRHNAEGRLSGRINNRFGDLNGSFSMNKNRNTNSTNHSLTGGYNSSFALTSDGFYWGGSTAGLTKLAGGIIKVKSNDTKKNLVKVTGTLYGDYSLGSNDNAFIPVPALTPASLIIEDNNYGDNNISILAPTNNDMFMLPGNVYPVEIETKVSVSYIGRGFDPNGTPLSGAHVLNEPHVILDEDGGFSFEYTGNEKTLFLLKGRTIYTCQLGKNKVHKGIVFVGDVICDINSTSSLPDEFVKNPRVQDLLAKNDKG

SEQ ID NO: 1561 - protein, 233 aa, Staphylococcus aureus; identical to SEQ ID NO: 1369

SEQ ID NO: 1562 - protein, 434 aa, Treponema pallidum
MKVKYALLSAGALQLLVVGCGSSHHETHYGYATLSYADYWAGELGQSRDVLLAGNAEADRAGDLDAGMFDAVSRATHGHGAFRQQFQYAVEVLGEKVLSKQETEDSRGRKKWEYETDPSVTKMVRASASFQDLGEDGEIKFEAVEGAVALADRASSFMVDSEEYKITNVKVHGMKFVPVAVPHELKGIAKEKFHFVEDSRVTENTNGLKTMLTEDSFSARKVSSMESPHDLVVDTVGTGYHSRFGSDAEASVMLKRADGSELSHREFIDYVMNFNTVRYDYYGDDASYTNLMASYGTKHSADSWWKTGRVPRISCGINYGFDRFKGSGPGYYRLTLIANGYRDVVADVRFLPKYEGNIDIGLKGKVLTIGGADAETLMDAAVDVFADGQPKLVSDQAVSLGQNVLSADFTPGTEYTVEVRFKEFGSVRAKVVAQ

SEQ ID NO: 1563 - protein, 173 aa, Mycobacterium tuberculosis
MSLRLVSPIKAFADGIVAVAIAVVLMFGLANTPRAVAADERLQFTATTLSGAPFDGASLQGKPAVLWFWTPWCPFCNAEAPSLSQVAAANPAVTFVGIATRADVGAMQSFVSKYNLNFTNLNDADGVIWARYNVPWQPAFVFYRADGTSTFVNNPTAAMSQDELSGRVAALTS

SEQ ID NO: 1564 - protein, 301 aa, Escherichia coli
MNILLFGKTGQVGWELQRALAPLGNLIALDVHSTDYCGDFSNPEGVAETVKKIRPDVIVNAAAHTDVDKAESEPEFAQLLNATSVEAIAKAANEVGAWVIHYSTDYVFPGTGEIPWQGGTDATAPLNVYGETKLSSEKKALQKHCGKHIIFRTSWVYAGKGNNFAKTMLRLAKEREELAVINDQFGRPTGAELLADCTAHAIRVAVDKPEVAGLYHLVAGGTTTWHDYAALVFEEARKAGINLALNKLNAVPTTAYPTPARRPHNSRLNTEKFQQNFALVLPDWQVGVKRMLNELFTTTAI

SEQ ID NO: 1565 - protein, 369 aa, Borrelia hermsii
MRKRISAIINKLNISIIIMTVVLMIGCGQQPEAGKTGVSGGVNGNLGNSLMELGRSAENAFYAFIELVSDVLGFTAKSDTTKQEVGGYFNSLGAKLGEASNDLEQVAVKAETGVDKSDSSKNPIREAVNEAKEVLGTLKGYVESLGTIGDSNPVGYANNAAGSGTTAADDELRKAFKALQEIVKAATDAGVKALKIGATTLQANGGADNKEGAKILATSGGNPAAADVAKAAAILSSVSGEEMLSSIVKSGENDAQLAAAADGNTSAISFAKGGSDAHLAGANTPKAAAVAGGIALRSLVKTGKLAAGAADNATGGGKEVQGVGVAAANKLLRAVEDVIKKTVKNVLEKAKEKIDKARGSQEPVSESSK

SEQ ID NO: 1566 - protein, 479 aa, Salmonella typhimurium
MSFLPVIMAGGTGSRLWPLSREYHPKQFLSVEGKLSMLQNTIKRLASLSTEEPVVICNDRHRFLVAEQLREIDKLANNIILEPVGRNTAPAIALAAFCALQNADNADPLLLVLAADHVIQDEIAFTKAVRHAEEYAANGKLVTFGIVPTHAETGYGYIRRGELIGNDAYAVAEFVEKPDIDTAGDYFKSGKYYWNSGMFLFRASSYLNELKYLSPEIYKACEKAVGHINPDLDFIRIDKEEFMSCPSDSIDYAVMEHTQHAVVIPMSAGWSDVGSWSSLWDISNKDHQRNVLKGDIFAHACNDNYIYSEDMFISAIGVSNLVIVQTTDALLVANKDTVQDVKKIVDYLKRNDRNEYKQHQEVFRPWGKYNVIDSGKNYLVRCITVKPGEKFVAQMHHHRAEHWIVLSGTARVTKGEQTYMVSENESTFIPPNTIHALENPGMTPLKLIEIQSGTYLGEDDIIRLEQRSGFSKEWTNERS

SEQ ID NO: 1567 - protein, 914 aa, Mycobacterium tuberculosis; identical to SEQ ID NO: 1535

SEQ ID NO: 1568 - protein, 833 aa, Yersinia pestis
MRYSKLFLCAGLTLATLPCWGRAYTFDSTMLDTNSGESIDVSLFNQGLQLPGNYFVNVFVNGRKVDSGNIDFRLEKHNGKELLWPCLSSLQLTKYGIDIDKYPDLIKSGTEQCVDLLAIPHSDVQFYFNQQKLSLIVPPQALLPRFDGIMPMQLWDDGIPALFMNYNTNMQTRKFREGGKSLDSYYAQLQPGLNIGAWRFRSSTSWWKQQGWQRSYIYAERGLNTIKSRLTLGETYSDSSIFDSIPIKGIKIASDESMVPYYQWNFAPVVRGIARTQARVEVLRDGYTVSNELVPSGPFELANLPLGGGSGELKVIIHESDGTKQVFTVPYDTPAVALRKGYFEYSMMGGEYRPANDLTQTSYVGALGMKYGLPRNLTLYGGLQGSQNYHAAALGIGAMLGDFGAISTDVTQADSQKNKQKKESGQRWRVRYNKYLQSGTSLNIASEEYATEGFNKLADTLNTYCKPNTRNDCRFDYAKPKNKVQFNLSQSIPGSGTLNFSGYRKNYWRDSRSTTSFSVGYNHFFRNGMSLTLNLSKTQNINKYGEKTSELLSNIWLSFPLSRWLGNNSINSNYQMTSDSHGNTTHEVGVYGEAFDRQLYWDVRERFNEKGRKYTSNALNLNYRGTYGEISGNYSYDQTQSQLGIGVNGNMVITQYGITAGQKTGDTIALVQAPDISGASVGYWPGMKTDFRGYTNYGYLTPYRENKVEINPVTLPNDAEITNNIVSVIPTKGAVVLAKFNARIGGRLFLHLKRSDNKPVPFGSIVTIEGQSSSSGIVGDNSGVYLTGLPKKSKILVKWGRDKNQSCSSNVVLPEKTDISGAYRLSTTCILNN

SEQ ID NO: 1569 - protein, 452 aa, Salmonella agona
MSLMQFSGLLVVWLLSTLFIATLTWFEFRRVRFNFNVFFSLLFLLTFFFGFPLTSVLVFRFDVGVAPPEILLQALLSAACFYGVYYVTYKTRLRKRVVDVPRKPLFTMNRVETHLTWVILMGIALVSVAIFFMHNGFLLFRLHSYSQIFSSEVSGVALKRFFYFFIPAMLVVYFLRQDSKAWLFFLVSTVAFGLLTYMIVGGTRANIIIAFAIFLFIGIIRGWISLWMLVAAGVLGIVGMFWLALKRYGLNVSGDEAFYTFLYLTRDTFSPWENLALLLQNYHNIDFQGLAPIVRDFYVFIPTWLWPGRPSIVLNSANYFTWEVLNNHSGLAISPTLIGSLVVMGGALFIPLGAIVVGLIIKWFDWLYELGNREPNRYKAAILHSFCFGAIFNMIVLAREGLDSFVSRVVFFLVVFGASLLVAKLLFWLFDSAGLIHKRTTSLPQAQVEGKL

SEQ ID NO: 1570 - protein, 362 aa, Mycoplasma penetrans
MKIKKIKLLKALALTGAFGIVATVPVIVSSCSSTSENNGNGNGNGGTDGNTQQTEVTPAIKSEVSLTGALSKIYDTKTGTDRETTSQLIVKDIKANPENYFTNGEALKDVIASATVTVDGGFTESTFTGEAYSVWSAKADVKKGTYSQASKQLDIKSINDLQTVLGDSAAIKGICDLIPNLKLNNGTDYKVTNNGLSLSEDLLHINVTAKDGQTDVSMDLAIPVSDLNLKIDGLKISVSGTGIKTSELTTNYKFNIGIDNTVKTLTPAAVTLAEADRTNAEKVLEKLGYATVSGSTYTLDQDKLADALGLYNCKFEAVKSEKDSTNNNKYTVTLKATPNDGYFWEDGTNGAKEEISFVATFS

SEQ ID NO: 1571 - protein, 388 aa, Bacillus cereus
MIKNPKVLILTAHYGNGHVQVAKTLEQTFRQKGIEDVIVCDLFGESHPFITDITKYLYLKSYTIGKELYRLFYYGVEKIYDKKIASWYANFGRKRLKTLLQVEKPDIVINTFPIIAVPELKKQTGISIPVYNVLTDFCVHKIWIHREVDRYFVATDHVKELMVDIGVPAEQIVETGIPIRSSFELKVNPEIIYTKYQLCKNKKILLIVAGAHGVLGNVKELCQSFMSVPNLQIVVVCGKNEALKQDLLSLQKQNSDALKVFGYVENIDELFRVTSCMITKPGGITLSEAAALQVPVILYKPVPGQENENAMYFERKGAAVVIRDDSEVFAKTEALLQDDVKLLQMKEAMKSIYLPEPAGHIVDAILAENHAEPRHIPIKSPALAQSFT

SEQ ID NO: 1572 - protein, 351 aa, Xanthomonas campestris
MATWLVTGRAGFIGGNFVLEAVSRGIRVVNLDALTYAGNLNTLASLEGNADHIFVKGDIGDGALVTRLLQEHQPDAVLNFAAESHVDRSIEGPGAFIQTNVVGTLALLEAVRDYWKALPDTRRDAFRFLHVSTDEVYGTLGETGKFTETTPYAPNSPYSASKAASDHLVRAFHHTYGLPVLTTNCSNNYGPYHFPEKLIPLVIAKALAGEPLPVYGDGKQVRDWLFVSDHCEAIRTVLAKGRVGETYNVGGNSERQNIEVVQAICALLDQHRPREDGKPRESQIAYVTDRPGHDRRYAIDASKLKDELGWEPAYTFEQGIAQTVDWYLTNQTWVQGVLDGSYRLERIGATV

SEQ ID NO: 1573 - protein, 406 aa, Salmonella typhimurium
MKVSFFLLKFPLSSETFVLNQITAFIDMGHEVEIVALQKGDTQHTHAAWEKYGLAAKTRWLQDEPQGRLAKLRYRACKTLPGLHRAATWKALNFTRYGDESRNLILSAICAQVSQPFVADVFIAHFGPAGVTAAKLRELGVLRGKIATIFHGIDISSREVLSHYTPEYQQLFRRGDLMLPISDLWAGRLKSMGCPPEKIAVSRMGVDMTRFTHRSVKAPGMPLEMISVARLTEKKGLHVAIEACRQLKAQGVAFRYRILGIGPWERRLRTLIEQYQLEDVIEMPGFKPSHEVKAMLDDADVFLLPSITGTDGDMEGIPVALMEAMAVGIPVVSTVHSGIPELVEAGKSGWLVPENDAQALAARLAEFSRIDHDTLESVITRAREKVAQDFNQQAINRQLASLLQTI

SEQ ID NO: 1574 - protein, 154 aa, Rickettsia montanensis
MKLLSKIMIIALAASMLQACNGPGGMNKQGTGTLLGGAGGALLGSQFGQGKGQLVGVGVGALLGAVLGGQIGAGMDEQDRRLAELTSQRALETAPSGSNVEWRNPDNGNYGYVTPNKTYRNSTGQYCREYTQTVVIGGKQQKAYGNACLQPDGQ

SEQ ID NO: 1575 - protein, 365 aa, Yersinia pestis
MNLLTMSTELIYIFLFSMAFLFVARKVAIKIGLVDKPNYRKRHQGLIPLVGGISVFAGVCFAFLITNQQIPHFRLYLACAGLLVFVGALDDRFDISVKIRAFVQALVGIAMMAVAGLYLRSLGHAFGPWEMVLGPFGYVVTLFAVWAAINAFNMVDGIDGLLGGLSCVSFGAMGILLYQSGQMSLALWCFAMIATIIPYILLNLGLLGRRYKVFMGDAGSTLIGFTAIWILLQATQGNAHPINPVTALWIIAIPLMDMIAIMYRRLRKGMSPFSPDRQHIHHLIMRAGFTSRQAFVLITLAAALLAMIGVIGERLTFIPEWVMLALFLLAFLLYGYCIKRAWRVARFIKRFKRRMRRASKNKHES

SEQ ID NO: 1576 - protein, 544 aa, Chlamydia trachomatis
MVAKNIKYNEEARKKIQKGVKTLAEAVKVTLGPKGRHVVIDKSFGSPQVTKDGVTVAKEVELADKHENMGAQMVKEVASKTADKAGDGTTTATVLAEAIYTEGLRNVTAGANPMDLKRGIDKAVKVVVDQIKKISKPVQHHKEIAQVATISANNDAEIGNLIAEAMEKVGKNGSITVEEAKGFETVLDVVEGMNFNRGYLSSYFATNPETQECVLEDALVLIYDKKISGIKDFLPILQQVAESGRPLLIIAEDIEGEALATLVVNRIRGGFRVCAVKAPGFGDRRKAMLEDIAILTGGQLISEELGMKLENANLAMLGKAKKVIVSKEDTTIVEGMGEKEALEARCESIKKQIEDSSSDYDKEKLQERLAKLSGGVAVIRVGAATEIEMKEKKDRVDDAQHATIAAVEEGILPGGGTALIRCIPTLEAFLPMLTNEDEQIGARIVLKALSAPLKQIAANAGKEGAIIFQQVMSRSANEGYDALRDAYTDMLEAGILDPAKVTRSALESAASVAGLLLTTEALIAEIPEEKPAAAPAMPGAGMDY

SEQ ID NO: 1577 - protein, 233 aa, Staphylococcus aureus
MKKTIMASSLAVALGVTGYAASTGHEAHAAEMNVDQAHLVDLAHNHQDQLNAAPIKDGAYDIHFVKDGFQYNFTSNGTTWSWSYEAANGQTAGFSNVAGADYTTSYNQGSNVQSVSYNAQSSNSNVEAVSAPTYHNYSTSTTSSSVRLSNGNTAGATGSSAAQIMAQRTGVSASTWAAIIARESNGQVNAYNPSGASGLFQTMPGWGPTNTVDQQINAAVKAYKAQGLSAWGF

SEQ ID NO: 1578 - protein, 460 aa, Mycobacterium tuberculosis
MTQSQTVTVDQQEILNRANEVEAPMADPPTDVPITPCELTAAKNAAQQLVLSADNMREYLAAGAKERQRLATSLRNAAKAYGEVDEEAATALDNDGEGTVQAESAGAVGGDSSAELTDTPRVATAGEPNFMDLKEAARKLETGDQGASLAHFADGWNTFNLTLQGDVKRFRGFDNWEGDAATACEASLDQQRQWILHMAKLSAAMAKQAQYVAQLHVWARREHPTYEDIVGLERLYAENPSARDQILPVYAEYQQRSEKVLTEYNNKAALEPVNPPKPPPAIKIDPPPPPQEQGLIPGFLMPPSDGSGVTPGTGMPAAPMVPPTGSPGGGLPADTAAQLTSAGREAAALSGDVAVKAASLGGGGGGGVPSAPLGSAIGGAESVRPAGAGDIAGLGQGRAGGGAALGGGGMGMPMGAAHQGQGGAKSKGSQQEDEALYTEDRAWTEAVIGNRRRQDSKESK

SEQ ID NO: 1579 - protein, 228 aa, Mycobacterium tuberculosis
MDTMRQRILVVDDDASLAEMLTIVLRGEGFDTAVIGDGTQALTAVRELRPDLVLLDLMLPGMNGIDVCRVLRADSGVPIVMLTAKTDTVDVVLGLESGADDYIMKPFKPKELVARVRARLRRNDDEPAEMLSIADVEIDVPAHKVTRNGEQISLTPLEFDLLVALARKPRQVFTRDVLLEQVWGYRHPADTRLVNVHVQRLRAKVEKDPENPTVVLTVRGVGYKAGPP

SEQ ID NO: 1580 - protein, 293 aa, Shigella flexneri
MKGIILAGGSGTRLHPITRGVSKQLLPIYDKPMIYYPLSVLMLAGIREILIITTPEDKGYFQRLLGDGSEFGIQLEYAEQPSPDGLAQAFIIGETFLNGEPSCLVLGDNIFFGQGFSPKLRHVAARTEGATVFGYQVMDPERFGVVEFDDNFRAISLEEKPKQPKSNWAVTGLYFYDSKVVEYAKQVKPSERGELEITSINQMYLEAGNLTVELLGRGFAWLDTGTHDSLIEASTFVQTVEKRQGFKIACLEEIAWRNGWLDDEGVKRAASSLAKTGYGQYLLELLRARPRQY

SEQ ID NO: 1581 - protein, 176 aa, Mycoplasma hyorhinis
MKKSIFSKKLLVSFGSLVALAAIPLIAISCGQTDNNSSQSQQPGSGTTNTSGGTNSSGSTNGTAGTNSSGSTNGSGNGSNSETNTGNKTTSESNSGSSTGSQAGTTTNTGSGSNSESGMNSEKTENTQQSEAPGTNTGNKTTSESNSESGMNSEKTENTQQSEAPGTKTENTQHTS

SEQ ID NO: 1582 - protein, 259 aa, Klebsiella pneumoniae
MSLKMKYNLGYLFDLLVVITNKDLKVRYKSSVFGYLWSIANPLLFAMIYYFIFKLVMRVQIPNYTLFLITGLFPWQWFASSATNSLFSFIANAQIIKKTVFPRSVIPLSNVMMEGLHFLCTIPVIIAFLFVYGMRPSLSWLWGIPIIAIGQVIFTFGISIIFSTLNLFFRDLERFVSLGIMLMFYCTPILYASDMIPEKFSWIITYNPLASMILSWRELFMNGVLNYEYISILYITGFILTIVGLAIFNKLKYRFAEIL

SEQ ID NO: 1583 - protein, 260 aa, Mycobacterium tuberculosis; identical to SEQ ID NO: 1530

SEQ ID NO: 1584 - protein, 1020 aa, Streptococcus agalactiae
MFRRSKNNSYDTSQTKQRFSIKKFKFGAASVLIGLSFLGGVTQGNLNIFEESIVAASTIPGSAATLNTSITKNIQNGNAYIDLYDVKLGKIDPLQLIVLEQGFTAKYVFRQGTKYYGDVSQLQSTGRASLTYNIFGEDGLPHVKTDGQIDIVSVALTIYDSTTLRDKIEEVRTNANDPKWTEESRTEVLTGLDTIKTDIDNNPKTQTDIDSKIVEVNELEKLLVLSVPDKDKYDPTGGETTVPQGTPVSDKEITDLVKIPDGSKGVPTVVGDRPDTNVPGDHKVTVEVTYPDGTKDTVEVTVHVTPKPVPDKDKYDPTGGETTVPQGTPVSDKEITDLVKIPDGSKGVPTVVGDRPDTNVPGDHKVTVEVTYPDGTKDTVEVTVHVTPKPVPDKDKYDPTGGETTVPQGTPVSDKEITDLVKIPDGSKGVPTVVGDRPDTNVPGDHKVTVEVTYPDGTKDTVEVTVHVTPKPVPDKDKYDPTGGETTVPQGTPVSDKEITDLVKIPDGSKGVPTVVGDRPDTNVPGDHKVTVEVTYPDGTKDTVEVTVHVTPKPVPDKDKYDPTGGETTVPQGTPVSDKEITDLVKIPDGSKGVPTVVGDRPDTNVPGDHKVTVEVTYPDGTKDTVEVTVHVTPKPVPDKDKYDPTGGETTVPQGTPVSDKEITDLVKIPDGSKGVPTVVGDRPDTNVPGDHKVTVEVTYPDGTKDTVEVTVHVTPKPVPDKDKYDPTGGETTVPQGTPVSDKEITDLVKIPDGSKGVPTVVGDRPDTNVPGDHKVTVEVTYPDGTKDTVEVTVHVTPKPVPDKDKYDPTGGETTVPQGTPVSDKEITDLVKIPDGSKGVPTVVGDRPDTNVPGDHKVTVEVTYPDGTKDTVEVTVHVTPKPVPDKDKYDPTGGETTVPQGTPVSDKEITDLVKIPDGSKGVPTVVGDRPDTNVPGDHKVTVEVTYPDGTKDTVEVTVHVTPKPVPDKDKYDPTGKAQQVNGKGNKLPATGENATPFFNVAALTIISSVGLLSVSKKKED

SEQ ID NO: 1585 - protein, 348 aa, Escherichia coli; identical to SEQ ID NO: 1263

SEQ ID NO: 1586 - protein, 348 aa, Neisseria gonorrhoeae
MKKSLIALTLAALPVAATADVTLYGAIKAGVQTYRSVEHTDGKVSKVETGSEIADFGSKIGFKGQEDLGNGLKAVWQLEQGASVAGTNTGWGNKQSFVGLKGGFGTIRAGSLNSPLKNTDANVNAWESGKFTGNVLEISGMAKREHRYLSVRYDSPEFAGFSGSVQYAPKDNSGSNGESYHVGLNYQNSGFFAQYAGLFQRYGEGTKKIEYEHQVYSIPSLFVEKLQVHRLVGGYDNNALYVSVAAQQQDAKLYGARRANSHNSQTEVAATAAYRFGNVTPRVSYAHGFKGTVDSADHDNTYDQVVVGAEYDFSKRTSALVSAGWLQEGKGADKIVSTASAVVLRHKF

SEQ ID NO: 1587 - protein, 383 aa, Bacillus licheniformis
MNTNKNILILTANYGNGHVQVAKTLYQECERLGFKNVTVSNLYQESNPIVSEITQYLYLKSFSIGKQFYRLFYYGVDKIYNKRKFNIYFKMGNKRLDQLVKKHQPDIIINTFPMIVVPEYRRRMGKVIPTFNVMTDFCLHKIWVHEHIDKYYVATDYVKEKLLEIGTHPSNVKITGIPIRRQFEEEMDKDKIYEKYQLSPDKKILLIMAGAHGVLKNVKELCESLVTKEDVQVVVVCGKNTMLKSSLEDIEALYPNKLRTLGYIERIDELFRVADCMITKPGGITLTEATAIGVPVILYKPVPGQEKENALFFEDRGAAIVVNRHEEILESVSSLLADEKKLNEMKKNIKSLHLSNSSEVILTDIIEQSEIIMNKKQTVRALS

SEQ ID NO: 1588 - protein, 181 aa, Shigella flexneri
MNVIKTEIPDVLIFEPKVFGDERGFFMESFNQKVFEEAVGRKVEFVQDNHSKSTKGVLRGLHYQLEPYAQGKLVRCVVGEVFDVAVDIRKSSPTFGKWVGVNLSAENKRQLWIPEGFAHGFCVLSDEAEFVYKTNNFYSKMQERGILWSDKSINIEWPVQNPLLSDKDINGQKFVDADYFI

SEQ ID NO: 1589 - protein, 372 aa, Pseudomonas aeruginosa
MKVLVTGANGFVGRNLCAHLAERGGIEVVPFTRESSVGNLPELIRSVDFIFHLAGVNRPEKPEEFKIGNSELTYALCEAVRSNGRAIPLLYTSSIQAEVDNEYGLSKRAAEEHLQVLGEDIGCPVYIFRLPNVFGKWSRPNYNSAVATFCHNIIRDIPIQINNSSAEITLVYIDDVVRTFMKVMDGKLSNAVSLQVEPQYQISVGELAEQLYEFRNSRKSLTTARVGSGLTRALYSTYLSFLPEDSFSYDVPMHSDPRGTFVEMLKTADSGQFSFFTAHPGVTRGGHYHHSKTEKFLVIKGMARFKFRNILTGAFYEICTNGEKAEIVETVPGWTHDITNVGTDDMVVMLWANEVFDRENPDTYACSVGEGA

SEQ ID NO: 1590 - protein, 154 aa, Rickettsia parkeri
MKLLSKIMVIALATSMLQACNGPGGMNKQGTGTLLGGAGGALLGSQFGKGKGQLVGVGVGALLGAVLGGQIGAGMDEQDRRLAELTSQRALETAPSGSNVEWRNPDNGNYGYVTPNKTYRNSTGQYCREYTQTVVIGGKQQKAYGNACLQPDGQ

SEQ ID NO: 1591 - protein, 246 aa, Escherichia fergusonii
MNNNTTAPTYTLRGLQLIGWRDMQHALDYLFADGQLKQGTLVAINAEKMLTIEDNAEVRALINAAEFKYADGISVVRSVRKKYPQAQVSRVAGADLWEELMARAGKEGTPVFLVGGKPEVLAQTEAKLRNQWNVNIVGSQDGYFKPEQRQALFERIHASGAQIVTVAMGSPKQEIFMRDCRLVHPDALYMGVGGTYDVFTGHVKRAPKIWQTLGLEWLYRLLSQPSRIKRQLRLLRYLRWHYTGNL

SEQ ID NO: 1592 - protein, 544 aa, Chlamydia trachomatis
MVAKNIKYNEEARKKIQKGVKTLAEAVKVTLGPKGRHVVIDKSFGSPQVTKDGVTVAKEVELADKHENMGAQMVKEVASKTADKAGDGTTTATVLAEAIYTEGLRNVTAGANPMDLKRGIDKAVKVVVDQIRKISKPVQHHKEIAQVATISANNDAEIGNLIAEAMEKVGKNGSITVEEAKGFETVLDIVEGMNFNRGYLSSYFATNPETQECVLEDALVLIYDKKISGIKDFLPVLQQVAESGRPLLIIAEDIEGEALATLVVNRIRGGFRVCAVKAPGFGDRRKAMLEDIAILTGGQLISEELGMKLENANLAMLGKAKKVIVSKEDTTIVEGMGEKEALEARCESIKKQIEDSSSDYDKEKLQERLAKLSGGVAVIRVGAATEIEMKEKKDRVDDAQHATIAAVEEGILPGGGTALIRCIPTLEAFLPMLTNEDEQIGARIVLKALSAPLKQIAANAGKEGAIIFQQVMSRSANEGYDALRDAYTDMLEAGILDPAKVTRSALESAASVAGLLLTTEALIAEIPEEKPAAAPAMPGAGMDY

SEQ ID NO: 1593 - protein, 233 aa, Staphylococcus aureus; identical to SEQ ID NO: 1369

SEQ ID NO: 1594 - protein, 165 aa, Neisseria gonorrhoeae
MNTLQKGFTLIELMIVIAIVGILAAVALPAYQDYTARAQVSEAILLAEGQKSAVTEYYLNHGKWPENNTSAGVASPPSDIKGKYVKEVEVKNGVVTATMLSSGVNNEIKGKKLSLWARRENGSVKWFCGQPVTRTDDDTVADAKDGKEIDTKHLPSTCRDNFDAK

SEQ ID NO: 1595 - protein, 309 aa, Streptococcus anginosus
MKKLGTLLVLFLSVIALVACASGKKDATSGQKLKVVATNSIIADITKNIAGDKIDLHSIVPVGQDPHEYEPLPEDVKKTSQADLIFYNGINLETGGNAWFTKLVENAKKTENKDYFAVSEGVDVIYLEGQNEKGKEDPHAWLNLENGMIYAKNIAKQLIAKDPSNKEFYEKNLKDYTEKLDKLDKEAKEKFNNIPAEKKLIVTSEGCFKYFSKAYGVPSAYIWEINTEEEGTPEQIKTLVEKLRQTKVPSLFVESSVDDRPMKTVSQDTNIPIYAQIFTDSIAEEGKEGDSYYSMMKYNLDKIAEGLSK

SEQ ID NO: 1596 - protein, 130 aa, Histophilus somni
MAENQNYGTGRRKSSSARVFIKPGSGKIVINQRELDVYFGRETSRMIVRQPLELVELTDKLDLYVTVKGGGISGQAGAIRHGITRALIEYDETLRPALRAAGFVTRDARRVERKKIGLHKARRRPQYSKR

SEQ ID NO: 1597 - protein, 218 aa, Borrelia hermsii
MRKRISAIIMTLFMVFMSCNNGGPELKSDEVAKSDGTVLDLAKISKKIKDAVEFAASVKEIETLVKSIDELAKAIGKKIKQNSEDLEVDNGKNNKNGELVAGAFQVMLTVKAKLEKLGNTPEISEELKGKITDSKSKCKEFVDKVKADSDISKAEATDEHVKKAIDQVNAPAGEKGVVELVKLNKSIGELLKAANAAAEAAIAELTAPVKAEKPSQNN

SEQ ID NO: 1598 - protein, 437 aa, Yersinia pseudotuberculosis
MRVPTHIIVAASAWGSRLVSIFIQFYSIKILLDLLGTEGYAVFTVIGSLVGWFLLADFGLGNSLQNQISYRRANHQEYQDLVLSAVIAIIPIFILFIILILTLSPYISEFLLGGFDFLNNNQRSNIFKVASFIFLTTSIGNLAYKIWFSEHKGWVSNIIPALSSIVGLVFLMRLPSDGSNISEDIIFSIYCFYIPAAFFGVISTLFKVIPYLKCKNFLNKLTLYTLIKNGGGFFLFSVLSALVLQVDYIVMSQTLVERDLVTYNIMSKTFGLINFIYAALLQSLWPVCAEASSKLRFDNFYKIEKKYISFGFIIVIASSFVIFLLKDFIVNILAPGKDFYFPISLIILFSFYQVVRVWTDTYAMFLMSIGKLKPLWISVPFQAVLSGSLQWVGAVNYGLVGLLCGLIASFLITVSWWLPFSFRSTVDRIVKDKRLDE

SEQ ID NO: 1599 - protein, 275 aa, Escherichia coli
MSDDTPKFSVLMAIYIKDSPLFLSEALQSIYKNTVAPDEVIIIRDGKVTSELNSVIDSWRRYLNIKDFTLEKNMGLGAALNFGLNQCMHDLVIRADSDDINRTNRFECILDFMTKNGDVHILSSWVEEFEFNPGDKGIIKKVPSRNSILKYSKNRSPFNHPAVAFKKCEIMRVGGYGNEYLYEDYALWLKSLANGCNGDNIQQVLVDMRFSKETAKRRGGIKYAISEIKAQYHFYRANYISYQDFIINIITRIFVRLLPTSFRGYIYKKVIRRFL

SEQ ID NO: 1600 - protein, 310 aa, Burkholderia pseudomallei
MNMHVDMGRALTVRDWPALEALAKTMPADAGARAMTDDDLRAAGVDRRVPEQKLGAAIDEFASLRLPDRIDGRFVDGRRANLTVFDDARVAVRGHARAQRNLLERLETELLGGTLDTAGDEGGIQPDPILQGLVDVIGQGKSDIDAYATIVEGLTKYFQSVADVMSKLQDYISAKDDKNMKIDGGKIKALIQQVIDHLPTMQLPKGADIARWRKELGDAVSISDSGVVTINPDKLIKMRDSLPPDGTVWDTARYQAWNTAFSGQKDNIQNDVQTLVEKYSHQNSNFDNLVKVLSGAISTLTDTAKSYLQI

SEQ ID NO: 1601 - protein, 452 aa, Salmonella dublin; identical to SEQ ID NO: 1279

SEQ ID NO: 1602 - protein, 392 aa, Neisseria meningitidis
MRKKLTALVLSALPLAAVADVSLYGEIKAGVEGRNYQLQLTEAQAANGGASGQVKVTKVTKAKSRIRTKISDFGSFIGFKGSEDLGDGLKAVWQLEQDVSVAGGGATQWGNRESFIGLAGEFGTLRAGRVANQFDDASQAIDPWDSNNDVASQLGIFKRHDDMPVSVRYDSPEFSGFSGSVQFVPIQNSKSAYTPAYYTKNTNNNLTLVPAVVGKPGSDVYYAGLNYKNGGFAGNYAFKYARHANVGRNAFELFLIGSGSDQAKGTDPLKNHQVHRLTGGYEEGGLNLALAAQLDLSENGDKTKNSTTEIAATASYRFGNAVPRISYAHGFDFIERGKKGENTSYDQIIAGVDYDFSKRTSAIVSGAWLKRNTGIGNYTQINAASVGLRHKF

SEQ ID NO: 1603 - protein, 391 aa, Staphylococcus aureus; identical to SEQ ID NO: 1347

SEQ ID NO: 1604 - protein, 201 aa, Porphyromonas gingivalis
MLLSRYIDDDLRECGCDEAGRGCLAGPVYAAAVILPADFSHPLLNDSKQLSEKQRYTLRPVIESETIGWGIGIVSPQEIDEINILRASFLAMHRAIEQLPFRPERLLIDGNRFDPFEQIPHHCIVGGDARYRSIAAASILAKTYRDDSMLRLNKDFPMYGWERNKGYPSPAHKSAIRRFGVSPHHRLTFRGVVDADRPTTE

SEQ ID NO: 1605 - protein, 400 aa, Pseudomonas aeruginosa
MARIFVVSEYVGANQNSTGYYWEKIIGKMQREFGGLTVIFPLTAGETPPVVSPSVDQECFKFPRSNKNRLLSRGLAQIFQAFLFSVKLTSRARRGDVVLSGTNPALLLMTFPLLRYALGFKWVLLVHDVFPENLVPAGVLKKDSIAYRLLRRLFSFIYSSADRLVVIGRDMEALMKEKVNDPRSLVFISNWACEKEVFPVPREDAPFINIPEWKGKRVFQFFGNVGRLQGIENILSAIQLVKNEKAAFAFIGDGALVDSVKKHALEDQCARLRYFGRLPLAEKNFGLAACDVALVTLEEGMFGLGVPSKAYFSMAADKPILAVMEKGAEISRIIDETGIGWNCPPNDPVALARLIDEICELDLSSLGGVPRSVLQQNYSEYISLEKFAACVRPLLSESKI

SEQ ID NO: 1606 - protein, 159 aa, Rickettsia prowazekii
MKLLSKIMIIALAASMLQACNGQSGMNKQGTGTLLGGAGGALLGSQFGQGKGQLVGVGVGALLGAVLGGQIGASMDEQDRRLLELTSQRALESAPSGSNIEWRNPDNGNHGYVTPNKTYRNSAGQYCREYTQTVIIGGKQQKTYGNACRQPDGQWQVVN

SEQ ID NO: 1607 - protein, 248 aa, Klebsiella pneumoniae
MDMTGTISAPLYLLRGLQLIGWRDMPHALDYLFADGALREGTLVAINAEKMLAVEDNPEVRALIEAAEFKYADGISVVRSLRKKYPQAQVSRVAGADLWEALMQRAGAEGTPVFLVGGKPEVLAQTESRLRQRWQVNIVGSQDGYFTPEQRQALFERIRDSGAKIVTVAMGSPRQEIFMRDCRRLYPHALYMGVGGTYDVFTGHVHRAPKFWQDLGLEWFYRLLLQPSRIKRQFRLLRYLRWHYSGKL

SEQ ID NO: 1608 - protein, 548 aa, Legionella pneumophila
MAKELRFGDDARLQMLAGVNALADAVQVTMGPRGRNVVLEKSYGAPTVTKDGVSVAKEIEFEHRFMNMGAQMVKEVASKTSDTAGDGTTTATVLARSILVEGHKAVAAGMNPMDLKRGIDKAVLAVTKKLQAMSKPCKDSKAIAQVGTISANSDEAIGAIIAEAMEKVGKEGVITVEDGNGLENELSVVEGMQFDRGYISPYFINNQQNMSCELEHPFILLVDKKVSSIREMLSVLEGVAKSGRPLLIIAEDVEGEALATLVVNNMRGIVKVCAVKAPGFGDRRKAMLQDIAILTKGQVISEEIGKSLEGATLEDLGSAKRIVVTKENTTIIDGEGKATEINARITQIRAQMEETTSDYDREKLQERVAKLAGGVAVIKVGAATEVEMKEKKARVEDALHATRAAVEEGIVAGGGVALIRAQKALDSLKGDNDDQNMGINILRRAIESPMRQIVTNAGYEASVVVNKVAEHKDNYGFNAATGEYGDMVEMGILDPTKVTRMALQNAASVASLMLTTECMVADLPKKEEGVGAGDMGGMGGMGGMGGMM

SEQ ID NO: 1609 - protein, 233 aa, Staphylococcus aureus
MKKTIMASSLAVALGVTGYAAGTGHQAHAAEVNVDQAHLVDLAHNHQDQLNAAPIKDGAYDIHFVKDGFQYNFTSNGTTWSWSYEAANGQTAGFSNVAGADYTTSYNQGSNVQSVSYNAQSSNSNVEAVSAPTYHNYSTSTTSSSVRLSNGNTAGATGSSAAQIMAQRTGVPASTWAAIIARESNGQVNAYNPSGASGLFQTMPGWGPTNTVDQQINAAVKAYKAQGLGAWGF

SEQ ID NO: 1610 - protein, 330 aa, Mycobacterium intracellulare
MTDLSEKVRAWGRRLVVGAAAAATLPGLIGIAGGAATANAFSRPGLPVEYLQVPSAGMGRDIKVQFQSGGNGSPAVYLLDGLRAQDDYNGWDINTPAFEWYYQSGLSVIMPVGGQSSFYADWYQPACGKAGCSTYKWETFLTSELPQYLASNKGVKSTGSAAVGISMSGSSAMILAVNHPNQFVYAGSLSALLDPSQGMGPSLIGLAMGDAGGYKADAMWGPSSDPAWQRNDPSLQIPALVGNNTRLWVYCGNGTPSELGGANMPAEFLENFVRSSNLKFQDAYNAAGGHNAVFNFNANGTHSWEYWGAQLNAMKPDLQSALGASSGGGG

SEQ ID NO: 1611 - protein, 309 aa, Streptococcus mitis
MKKLGTLFVLFLSVIVLVACASGKKDAASGQKLKVVATNSIIADITKNIAGDKIDLHSIVPIGQDPHEYEPLPEDVKKTSEADLIFYNGINLETGGNAWFSKLVENAKKTENKDYFAVSEGVDVIYLEGKNEKGKEDPHAWLNLENGIIFAKNIAKQLSAKDPNNKEFYEKNLKEYTDKLDKLDKESKDKFNNIPAEKKLIVTSEGAFKYFSKAYGVPSAYIWEINTEEEGTPEQIKTLVEKLRQTKVPSLFVESSVDDRPMKTVSQDTNIPIYAQIFTDSIAEQGKEGDSYYNMMKYNLDKIAEGLAK

SEQ ID NO: 1612 - protein, 207 aa, Mycobacterium tuberculosis
MAEYTLPDLDWDYGALEPHISGQINELHHSKHHATYVKGANDAVAKLEEARAKEDHSAILLNEKNLAFNLAGHVNHTIWWKNLSPNGGDKPTGELAAAIADAFGSFDKFRAQFHAAATTVQGSGWAALGWDTLGNKLLIFQVYDHQTNFPLGIVPLLLLDMWEHAFYLQYKNVKVDFAKAFWNVVNWADVQSRYAAATSQTKGLIFG

SEQ ID NO: 1613 - protein, 215 aa, Borrelia hermsii
MRKRISAIIMTLFMVFMSCNNGGPELKSDEVAKSDGTVLDLAKISKKIKDAVEFAASVKEIETLVKSIDELAKTIGQKLTKDTGVLAADANNNNGGLIAGVYGIVTDVGTKLDGLLKVNGISEDIKTKINDSKSKGTAFLSKVKGDDDLCKKDATDAHAKNAIDKNDNTGGKGKTELIALNTAIDELLKAANEAVEAAIKELTAPVKAEKPSQNN

SEQ ID NO: 1614 - protein, 418 aa, Shigella flexneri
MSIIKNSVWNLFGYAIPTLIAIPSLGFLARGLGPEGFGVYTIAIALVGYAGIFDVGLTRSVIREIAIHRDNHHERTKVISTSTSFLVLFSCFGAFLLLIFSDGIVNYLKISGVEHSDIQLAFKLLAICIPLFILNQLWSAILEGDEKFGIVNIQKSISSSCIAGIPAIFVFYSATLSAAVAGLIFARVISILVSAYYVRNDIKISGVHFCYKTFKRLFFFGGWMTVSNIISPVMVYFDRFIVSNIMGADKVAFYSAPAEVILKLGIIPAAIGRAVFPRLSNIKDFKEFKRNVNKSLLLMFLICLPVIIIGLLYSGLVLKIWFGENYQINSFNILNVLLIGFFFNALAMIPFSAIQALGKSKITALIHCAELVPYLALLYFMVEKYGLLGAAISWSIRVILDALLLQWLYTRMCSVYEN

SEQ ID NO: 1615 - protein, 316 aa, Pseudomonas aeruginosa
MKNFALIGAAGYIAPRHMRAIKDTGNCLVSAYDINDSVGIIDSISPQSEFFTEFEFFLDHASNLKRDSATALDYVSICSPNYLHYPHIAAGLRLGCDVICEKPLVPTPEMLDQLAVIERETDKRLYNILQLRHHQAIIALKDKVAREKSPHKYEVDLTYITSRGNWYLKSWKGDPRKSFGVATNIGVHFYDMLHFIFGKLQRNVVHFTSEYKAAGYLEYEQARVRWFLSVDANDLPESVKGKKPTYRSITVNGEEMEFSEGFTDLHTTSYEEILAGRGYGIDDARHCVETVNTIRSAVIVPASDNEGHPFVAALAR

SEQ ID NO: 1616 - protein, 176 aa, Yersinia pestis
MHKKYSCLQIGIHWLVLLLVIIAWSSIELRGFAPRSYQPWMKMIHFSCGIAILVLMMTRILIQLRYPTPPIVPKPSPMIVGLAHVGHWVIYLLFIALPIIGIAILYCRGSSWIAFGLIMPHAEQANFDLADTLKAYHLLLANMSYFVIGLHALAALLHHYVLKDNTLLRMMPKKRG

SEQ ID NO: 1617 - protein, 452 aa, Salmonella enteritidis; identical to SEQ ID NO: 1279

SEQ ID NO: 1618 - protein, 2249 aa, Rickettsia rickettsii
MANISPKLFKKAIQQGLKAALFTTSTAAIMLSSSGALGVATGVIATNNNAAFSNNVGNNNWNEITAAGVANGTPAGGPQNNWAFTYGGDYTVTADAADRIIKAINVAGTTPVGLNITQNTVVGSIITKGNLLPVTLNAGKSLTLNGNNAVAANHGFDAPADNYTGLGNIALGGANAALIIQSAAPSKITLAGNIDGGGIITVKTDAAINGTIGNTNALATVNVGAGTATLGGAVIKATTTKLTNAASVLTLTNANAVLTGAIDNTTGGDNVGVLNLNGALSQVTGDIGNTNSLATISVGAGTATLGGAVIKATTTKLTDAASAVKFTNPVVVTGAIDNTGNANNGIVTFTGNSTVTGNVGNTNALATVNVGAGLLQVQGGVVKANTINLTDNASAVTFTNPVVVTGAIDNTGNANNGIVTFTGNSTVTGDIGNTNALATVNVGAGTATLGGAVIKATTTKLTNAASVLTLTNANAVLTGAIDNTTGGDNVGVLNLNGALSQVTGNIGNTNSLATISVGAGTATLGGAVIKATTTKLTDAASAVKFTNPVVVTGAIDNTGNANNGIVTFTGNSTVTGDIGNTNSLATISVGAGTATLGGAVIKATTTKLTNAASVLTLTNANAVLTGAIDNTTGGDNVGVLNLNGALSQVTGDIGNTNSLATISVGAGTATLGGAVIKATTTKITNAVSAVKFTNPVVVTGAIDSTGNANNGIVTFTGNSTVTGDIGNTNALATVNVGAGTATLGGAVIKATTTKLTNAASVLTLTNANAVLTGAIDNTTGGDNVGVLNLNGALSQVTGDIGNTNSLATISVGAGTATLGGAVIKATTTKLTNAASVLTLTNANAVLTGAVDNTTGGDNVGVLNLNGALSQVTGDIGNTNSLATISVGAGTATLGGAVIKATTTKLTNAASVLTLTNANAVLTGAIDNTTGGDNVGVLNLNGALSQVTGDIGNTNSLATISVGAGTATLGGAVIKATTTKLTDAASAVKFTNPVVVTGAIDNTGNANNGIVTFTGNSTVTGNVGNTNALATVNVGAGLLQVQGGVVKANTINLTDNASAVTFTNPVVVTGAIDNTGNANNGIVTFTGNSTVTGNVGNTNALATVNVGAGLLQVQGGVVKANTINLTDNASAVTFTNPVVVTGAIDNTGNANNGIVTFTGNSTVTGDIGNTNALATVNVGAGITLQAGGSLAANNIDFGARSTLEFNGPLDGGGKAIPYYFKGAIANGNNAILNVNTKLLTASHLTIGTVAEINIGAGNLFTIDASVGDVTILNAQNINFRARDSVLVLSNLTGVGVNNILLAADLVAPGADEGTVVFNGGVNGLNVGSNVAGTARNIGDGGGNKFNTLLIYNAVTITDDVNLEGIQNVLINKNADFTSSTAFNAGAIQINDATYTIDANNGNLNIPAGNIQFAHADAQLVLQNSSGNDRTITLGANIDPDNDDEGIVILNSVTAGKKLTIAGGKTFGGAHKLQTILFKGAGDCSTAGTTFNTTNIVLDITGQLELGATTANVVLFNDAVQLTQTGNIGGFLDFNAKNGMVTLNNNVNVAGAVQNTGGTNNGTLIVLGASNLNRVNGIAMLKVGAGNVTIAKGGKVKIGEIQGTGTNTLTLPAHFNLTGSINKTGGQALKLNFMNGGSVSGVVGTAANSVGDITTAGATSFASSVNAKGTATLGGTTSFANTFTNTGAVTLAKGSITSFAKNVTATSFVANSATINFSNSLAFNSNITGGGTTLTLGANQVTYTGTGSFTDTLTLNTTFDGAAKSGGNILIKSGSTLDLSGVSTLALVVTATNFDMNNISPDTKYTVISAETAGGLKPTSKENVKITINNDNRFVDFTFDASTLTLFAEDIAADVIDGDFAPGGPLANIPNAANIKKSLELMEDAPNGSDARQAFNNFGLMTPLQEADATTHLIQDVVKPSDTIAAVNNQVVASNISSNITALNARMDKVQSGNKGPVSSGDEDMDAKFGAWISPFVGNATQKMCNSISGYKSDTTGGTIGFDGFVSDDLALGLAYTRADTDIKLKNNKTGDKNKVESNIYSLYGLYNVPYENLFVEAIASYSDNKIRSKSRRVIATTLETVGYQTANGKYKSESYTGQLMAGYTYMMPENINLTPLAGLRYSTIKDKGYKETGTTYQNLTVKGKNYNTFDGLLGAKVSSNINVNEIVLTPELYAMVDYAFKNKVSAIDARLQGMTAPLPTNSFKQSKTSFDVGVGVTAKHKMMEYRINYDTNIGSKYFAQQGSVKVRVNF

SEQ ID NO: 1619 - protein, 388 aa, Bacillus anthracis; identical to SEQ ID NO: 1283

SEQ ID NO: 1620 - protein, 299 aa, Salmonella typhimurium
MNILLFGKTGQVGWELQRSLAPVGNLIALDVHSKEFCGDFSNPKGVAETVRKLRPDVIVNAAAHTAVDKAESEPELAQLLNATSVEAIAKAANETGAWVVHYSTDYVFPGTGDIPWQETDATSPLNVYGKTKLAGEKALQDNCPKHLIFRTSWVYAGKGNNFAKTMLRLAKERQTLSVINDQYGAPTGAELLADCTAHAIRVALNKPEVAGLYHLVAGGTTTWHDYAALVFDEARKAGITLALTELNAVPTSAYPTPASRPGNSRLNTEKFQRNFDLILPQWELGVKRMLTEMFTTTTI

SEQ ID NO: 1621 - protein, 338 aa, Escherichia coli
MKNVGFIVTKSEIGGAQTWVNEISNLIKEECNIFLITSEEGWLTHKDVFAGVFVIPGIKKYFDFLTLFKLRKILKENNISTLIASSANAGVYARLVRLLVDFKCIYVSHGWSCLYNGGRLKSIFCIVEKYLSLLTDVIWCVSKSDEKKAIENIGIKEPKIITVSNSVPQMPRCNNKQLQYKVLFVGRLTHPKRPELLANVISKKPQYSLHIVGGGERLESLKKQFSECENIHFLGEVNNFYNYHEYDLFSLISDSEGLPMSGLEAHTAAIPLLLSDVGGCFELIEGNGLLVENTEDDIGYKLDKIFDDYENYREQAIRASGKFVIENYASAYKSIILG

SEQ ID NO: 1622 - protein, 154 aa, Rickettsia rhipicephali
MKLLSKIMIIALAASMLQACNGPGGMNKQGTGTLLGGAGGALLGSQFGKGKGQLVGVGVGALLGAVLGGQIGAGMDEQDRRLAELTSQRALETAPSGSNVEWRNPDNGNYGYITPNKTYRNSTGQYCREYTQTVVIGGKQQKAYGNACLQPDGQ

SEQ ID NO: 1623 - protein, 359 aa, Salmonella paratyphi
MTVLIHVLGSDIPHHNHTVLRFFNDTLAATSEHAREFMVAGEDNGFTESCPALSLHFYGSKKVLAQAVIAKAKANRRQRFFFHGQFNTSLWLALLSGGIKPAQFYWHIWGADLYEVSHGLKFRLFYPLRRIAQGRVGGVFATRGDLSYFARQHPGVRGELLYFPTRMDPSLNAMAKERQRAGKLTILVGNSGDRSNQHIAALRAVYQQFGDTVNVVVPMGYPANNQAYIDEVRQAGLALFSAENLQILSEKMEFDAYLALLRQCDLGYFIFARQQGIGTLCLLIQADIPCVLNRDNPFWQDMAEQHLPVLFTTDDLNEQVVREAQRQLASVDKSGITFFSPNYLQPWHNALRIAAGEAE

SEQ ID NO: 1624 - protein, 555 aa, Orientia tsutsugamushi
MSKQIVHGDQCRKKIIEGINVVANAVGITLGPKGRCVAIEQSYGPPKITKDGVSVAKAIQLKDKSLNVGAQFVISVASKTADVAGDGTTTATVIADAAVRELNKAEVAGIDIQEVRKGAEKAVEAVIADVRKNSSPVKNEEEIAQVATVSSNGDREIGEKIANAMKQVGQEGVITVEDSKNFNFEVEVVKGMRFDRGYISQYFATNREKMITEFENPYILLLDQKVSTVQPLVPVLEAVAHTGKPLVLIADDVDGEALTALILNNLKGSIKVVAVKAPGFGDRKKEMLEDIAILTNGEVITEQLGIKLEKVNDTSKLGTANRVIVTKDHTTIVHDKNNSDIEKKVNSRCEQIREAIKDTTSDYEKEKLQERLAKLRNGVAVLKVGGATEVEQKERKDRVEDALHATRAAVEEGIVPGGGVALFYASRVLDSLKFDNEDQRVGINIIKKVLEAPVRQIVKNAGGKEDVVVNELSKSTDKNRGFDARTMQYVDMIKAGIVDPTKVVRTALQDAFSVASLVIATSAMITDHEEDNNTGNRSGGGVGGGHHGGMGGMDF

SEQ ID NO: 1625 - protein, 233 aa, Staphylococcus aureus; identical to SEQ ID NO: 1369

SEQ ID NO: 1626 - protein, 327 aa, Escherichia coli
MSERHLPDDQSSTIDPYLITSVRQTLAEQSAALQNLSKQLDSGQYQRVLNLIMNCKGHVILSGMGKSGHVGRKISATLASTGTPSFFIHPAEAFHGDLGMITPYDLLILISASGETDEILKLVPSLKNFGNRIIAITNNGNSTLAKNADAVLELHMANETCPNNLAPTTSTTLTMAIGDALAIAMIHQRKFMPNDFARYHPGGSLGRRLLTRVADVMQHDVPAVQLDASFKTVIQRITSGCQGMVMVEDAEGGLAGIITDGDLRRFMEKEGSLTSATAAQMMTREPLTLPEDTMIIEAEEKMQKHRVSTLLVTNKANKVTGLVRIFD

SEQ ID NO: 1627 - protein, 310 aa, Streptococcus pyogenes
MGKRMSLILGAFLSVFLLVACSSTGTKTAKSDKLKVVATNSIIADMTKAIAGDKIDLHSIVPIGQDPHEYEPLPEDVEKTSNADVIFYNGINLEDGGQAWFTKLVKNAQKTKNKDYFAVSDGIDVIYLEGASEKGKEDPHAWLNLENGIIYSKNIAKQLIAKDPKNKETYEKNLKAYVAKLEKLDKEAKSKFDAIAENKKLIVTSEGCFKYFSKAYGVPSAYIWEINTEEEGTPDQISSLIEKLKVIKPSALFVESSVDRRPMETVSKDSGIPIYSEIFTDSIAKKGKPGDSYYAMMKWNLDKISEGLAK

SEQ ID NO: 1628 - protein, 1562 aa, Streptococcus mutans
MKVKKTYGFRKSKISKTLCGAVLGTVAAVSVAGQKVFADETTTTSDVDTKVVGTQTGNPATNLPEAQGSASKEAEQSQNQAGETNGSIPVEVPKTDLDQAAKDAKSAGVNVVQDADVNKGTVKTAEEAVQKETEIKEDYTKQAEDIKKTTDQYKSDVAAHEAEVAKIKAKNQATKEQYEKDMAAHKAEVERINAANAASKTAYEAKLAQYQADLAAVQKTNAANQAAYQKALAAYQAELKRVQEANAAAKAAYDTAVAANNAKNTEIAAANEEIRKRNATAKAEYETKLAQYQAELKRVQEANAANEADYQAKLTAYQTELARVQKANADAKAAYEAAVAANNAKNAALTAENTAIKQRNENAKATYEAALKQYEADLAAVKKANAANEADYQAKLTAYQTELARVQKANADAKAAYEAAVAANNAANAALTAENTAIKKRNADAKADYEAKLAKYQADLAKYQKDLADYPVKLKAYEDEQASIKAALAELEKHKNEDGNLTEPSAQNLVYDLEPNANLSLTTDGKFLKASAVDDAFSKSTSKAKYDQKILQLDDLDITNLEQSNDVASSMELYGNFGDKAGWSTTVSNNSQVKWGSVLLERGQSATATYTNLQNSYYNGKKISKIVYKYTVDPKSKFQGQKVWLGIFTDPTLGVFASAYTGQVEKNTSIFIKNEFTFYDEDGKPINFDNALLSVASLNRENNSIEMAKDYTGKFVKISGSSIGEKNGMIYATDTLNFRQGQGGARWTMYTRASEPGSGWDSSDAPNSWYGAGAIRMSGPNNSVTLGAISSTLVVPADPTMAIETGKKPNIWYSLNGKIRAVNVPKVTKEKPTPPVKPTAPTKPTYETEKPLKPAPVAPNYEKEPTPPTRTPDQAEPNKPTPPTYETEKPLEPAPVEPSYEAEPTPPTRTPDQAEPNKPTPPTYETEKPLEPAPVEPSYEAEPTPPTPTPDQPEPNKPVEPTYEVIPTPPTDPVYQDLPTPPSVPTVHFHYFKLAVQPQVNKEIRNNNDINIDRTLVAKQSVVKFQLKTADLPAGRDETTSFVLVDPLPSGYQFNPEATKAASPGFDVTYDNATNTVTFKATAATLATFNADLTKSVATIYPTVVGQVLNDGATYKNNFTLTVNDAYGIKSNVVRVTTPGKPNDPDNPNNNYIKPTKVNKNENGVVIDGKTVLAGSTNYYELTWDLDQYKNDRSSADTIQKGFYYVDDYPEEALELRQDLVKITDANGNEVTGVSVDNYTNLEAAPQEIRDVLSKAGIRPKGAFQIFRADNPREFYDTYVKTGIDLKIVSPMVVKKQMGQTGGSYENQAYQIDFGNGYASNIIINNVPKINPKKDVTLTLDPADTNNVDGQTIPLNTVFNYRLIGGIIPADHSEELFEYNFYDDYDQTGDHYTGQYKVFAKVDITFKDGSIIKSGAELTQYTTAEVDTAKGAITIKFKEAFLRSVSIDSAFQAESYIQMKRIAVGTFENTYINTVNGVTYSSNTVKTTTPEDPTDPTDPQDPSSPRTSTVINYKPQSTAYQPSSVQETLPNTGVTNNAYMPLLGIIGLVTSFSLLGLKAKKD

SEQ ID NO: 1629 - protein, 453 aa, Streptococcus mutans
MKMKRKLLSLVSVLTILLGAFWVTKIVKADQVTNYTNTASITKSDGTALSNDPSKAVNYWEPLSFSNSITFPDEVSIKAGDTLTIKLPEQLQFTTALTFDVMHTNGQLAGKATTDPNTGEVTVTFTDIFEKLPNDKAMTLNFNAQLNHNNISIPGVVNFNYNNVAYSSYVKDKDITPISPDVNKVGYQDKSNPGLIHWKVLINNKQGAIDNLTLTDVVGEDQEIVKDSLVAARLQYIAGDDVDSLDEAASRPYAEDFSKNVTYQTNDLGLTTGFTYTIPGSSNNAIFISYTTRLTSSQSAGKDVSNTIAISGNNINYSNQTGYARIESAYGRASSRVKRQAETTTVTETTTSSSSETTTSEATTETSSTTNNNSTTTETATSTTGASTTQTKTTASQTNVPTTTNITTTSKQVTKQKAKFVLPSTGEQAGLLLTTVGLVIVAVAGVYFYRTRR

SEQ ID NO: 1630 - protein, 407 aa, Salmonella typhimurium; identical to SEQ ID NO: 1438

SEQ ID NO: 1631 - protein, 359 aa, Shigella boydii
MTVLIHVLGSDIPHHNRTVLRFFNDALAATSEHAREFMVVGKDDGLSDSCPALSVQFFPGKKSLAEAVIAKAKANRQQRFFFHGQFNPTLWLALLSGGIKPSQFFWHIWGADLYELSSGLRYKLFYPLRRLAQKRVGCVFATRGDLSFFAKTHPKVRGELLYFPTRMDPSLNTMANDRQREGKMTILVGNSGDRSNDHIAALRAVHQQFGDTVKVVVPMGYPPNNEAYIEEVRQAGLELFSEENLQILSEKLEFDAYLALLRQCDLGYFIFARQQGIGTLCLLIQAGIPCVLNRENPFWQDMTEQHLPVLFTTDDLNEDIVREAQRQLASVDKNTIAFFSPNYLQGWQRALAIAAGEVA

SEQ ID NO: 1632 - protein, 170 aa, Yersinia pestis
MKKISSVIAIALFGTIATANAADLTASTTATATLVEPARITLTYKEGAPITIMDNGNIDTELLVGTLTLGGYKTGTTSTSVNFTDAAGDPMYLTFTSQDGNNHQFTTKVIGKDSRDFDISPKVNGENLVGDDVVLATGSQDFFVRSIGSKGGKLAAGKYTDAVTVTVSNQ

SEQ ID NO: 1633 - protein, 388 aa, Bacillus anthracis; identical to SEQ ID NO: 1283

SEQ ID NO: 1634 - protein, 194 aa, Borrelia burgdorferi
MYKNGFFKNYLSLFLIFLVIACTSKDSSNEYVEEQEAENSSKPDDSKIDEHTIGHVFHAMGVVHSKKDRKSLGKNIKVFYFSEEDGHFQTIPSKENAKLIVYFYDNVYAGEAPISISGKEAFIFVGITPDFKKIINSNLHGAKSDLIGTFKDLNIKNSKLEITVDENNSDAKTFLESVNYIIDGVEKISPMLTN

SEQ ID NO: 1635 - protein, 388 aa, Bacillus cereus
MIKNPKVLILTAHYGNGHVQVAKTLEQTFRQKGIKDVIVCDLFGESHPVITDITKYLYLKSYTIGKELYRLFYYGVEKIYDKKIASWYANFGRKRLKLLLKAEKPDIVINTFPIIAVPELKKQTGISIPVYNVLTDFCVHKIWIHREVDRYFVATDHVKKVMVDIGVPAEQIVETGIPIRSSFELKINPDIIYNKYQLCKNKKILLIVAGAHGVLGSVKELCQSFMSVPDLQVVVVCGKNEALKQDLVGVQDTNPDALKVFGYVENIDELFRVTSCMITKPGGITLSEAAALQVPVILYKPVPGQENENAMYFERKGAAVVIRDDSEVFAKTEALLQDDMKLLQMKEAMKSIYRPEPAGHIVDTILAENHVEPNHIPIKSPALAQSFT

SEQ ID NO: 1636 - protein, 361 aa, Escherichia coli
MKILVTGGAGFIGSAVVRHIINNTQDSVVNVDKLTYAGNRESLADVSDSERYVFEHADICDAPAMARIFAQHQPDAVMHLAAESHVDRSITGPAAFIETNIVGTYVLLEAARNYWSALDSDKKNSFRFHHISTDEVYGDLPHPDEVNNTEELPLFTETTAYAPSSPYSASKASSDHLVRAWKRTYGLPTIVTNCSNNYGPYHFPEKLIPLVILNALEGKALPIYGKGDQIRDWLYVEDHARALYTVVTEGKAGETYNIGGHNEKKNIDVVLTICDLLDEIVPKEKSYREQITYVADRPGHDRRYAIDAEKIGRALGWKPQETFESGIRKTVEWYLSNTKWVDNVKSGAYQSWIEQNYEGRQ

SEQ ID NO: 1637 - protein, 420 aa, Escherichia coli
MSFATISVIGLGYIGLPTAAAFASRQKQVIGVDINQHAVDTINRGEIHIVEPDLASVVKTAVEGGFLRASTTPVEADAWLIAVPTPFKGDHEPDMTYVESAARSIAPVLKKGALVILESTSPVGSTEKMAEWLAEMRPDLTFPQQVGEQADVNIAYCPERVLPGQVMVELIKNDRVIGGMTPVCSARASELYKIFLEGECVVTNSRTAEMCKLTENSFRDVNIAFANELSLICADQGINVWELIRLANRHPRVNILQPGPGVGGHCIAVDPWFIVAQNPQQARLIRTAREVNDHKPFWVIDQVKAAVADCLAATDKRASELKIACFGLAFKPNIDDLRESPAMEIAELIAQWHSGETLVVEPNIHQLPKKLTGLCTLAQLDEALATADVLVMLVDHSQFKVINGDNVHQQYVVDAKGVWR

SEQ ID NO: 1638 - protein, 159 aa, Rickettsia rickettsii; identical to SEQ ID NO: 1478

SEQ ID NO: 1639 - protein, 359 aa, Salmonella typhi
MTVLIHVLGSDIPHHNHTVLRFFNDTLAATGEHAREFMVAGEDNGFTESCPALSLRFYGSKKALAQAVIAKAKANRRQRFFFHGQFNISLWLALLSGGIKPAQFYWHIWGADLYEVSNGLKFRLFYPLRRIAQGRVGGVFATRGDLSYFARQHPGVRGELLYFPTRMDPSLNAMAKERQRAGKLTILVGNSGDRSNQHIAALRAVYQQFGDTVNVVVPMGYPANNQAYIDEVRQAGLALFSAENLQILSEKMEFDAYLALLRQCDLGYFIFARQQGIGTLCLLIQADIPCVLNRDNPFWQDMAEQHLPVLFTTDDLNEQVVREAQRQLASVDKSGITFFSPNYLQPWHNALRIAAGEAE

SEQ ID NO: 1640 - protein, 550 aa, Yersinia enterocolitica
MAAKDVKFGNDARIKMLRGVNILADAVKVTLGPKGRNVVLDKSFGSPTITKDGVSVAREIELEDKFENMGAQMVKEVASKANDAAGDGTTTATVLAQSIITEGLKAVAAGMNPMDLKRGIDKAVIAAVEELKKLSVPCSDSKAIAQVGTISANSDSTVGELIAQAMEKVGKEGVITVEEGSGLQDELDVVEGMQFDRGYLSPYFINKPETGSIELESPFILLADKKISNIREMLPVLEAVAKAGKPLLIIAEDVEGEALATLVVNTMRGIVKVAAVKAPGFGDRRKAMLQDIATLTAGTVISEEIGLELEKTTLEDLGQAKRVVINKDTTIIIDGVGDEAAIQGRVAQIRQQIEEATSDYDKEKLQERVAKLAGGVAVIKVGAATEVEMKEKKARVEDALHATRAAVEEGVVAGGGVALIRAASAITAAGLKGDNEDQNVGIKVALRAMESPLRQIVVNAGEEASVIANNVKAGSGSYGYNAYSEEYGDMIAMGILDPTKVTRSALQYAASIAGLMITTECMITDLPRDDKGADMGAGGMGGMGGMGGMM

SEQ ID NO: 1641 - protein, 235 aa, Staphylococcus epidermidis
MKKTVIASTLAVSLGIAGYGLSGHEAHASETTNVDKAHLVDLAQHNPEELNAKPVQAGAYDIHFVDNGYQYNFTSNGSEWSWSYAVAGSDADYTESSSNQEVSANTQSSNTNVQAVSAPTSSESRSYSTSTTSYSAPSHNYSSHSSSVRLSNGNTAGSVGSYAAAQMAARTGVSASTWEHIIARESNGQLHARNASGAAGLFQTMPGWGSTGSVNDQINAAYKAYKAQGLSAWGM

SEQ ID NO: 1642 - protein, 1654 aa, Rickettsia rickettsii
MAQKPNFLKKLISAGLVTASTATIVASFAGSAMGAAIQQNRTTNGAATTVDGAGFDQTAAPANVGVALNAVITANANNGINFNTPAGSFNGLLLNTANNLAVTVSEDTTLGFITNVVHNAHSFNLTLNAGKTLTITGQGVTNAQAAATKNAQNVVVQFNNGAAIDNNDLKGVGRIDFGAPASTLVFNLANPTTQKAPLILGDNAVIANGVNGTLNVTNGFIQVSNKSFATVKAINIADGQGIIFNTDANNANTLNLQAGGTTINFTGTDGTGRLVLLSKHAAATNFNITGSLGGNLKGVIEFNTVAVDGQLTANAGAANAVIGTNNGAGRAAGFVVSVDNGKVATIDGQVYAKDMVIQSANATGQVNFRHIVDVGADGTTAFKTAASKVTITQDSNFGNTDFGNLAAQIKVPNAITLTGNFTGDASNPGNTAGVITFDANGTLESASADANVAVTNNITAIEASGAGVVQLSGTHAAELRLGNAGSIFKLADGTVINGKVNQTALVGGALAAGTITLDGSATITGDIGNAGGAAALQRITLANDAKKTLTLGGANIIGAGGGTIDLQANGGTIKLTSTQNNIVVDFDLAIATDQTGVVDASSLTNAQTLTINGKIGTIGANNKTLGQFNIGSSKTVLSNGNVAINELVIGNDGAVQFAHDTYLITRTTNAAGQGKIIFNPVVNNGTTLAAGTNLGSATNPLAEINFGSKGVNVDTVLNVGEGVNLYATNITTTDANVGSFVFNAGGTNIVSGTVGGQQGNKFNTVALENGTTVKFLGNATFNGNTTIAANSTLQIGGNYTADCVASADGTGIVEFVNTGPITVTLNKQAAPVNALKQITVSGPGNVVINEIGNAGNHHGAVTDTIAFENSSLGAVVFLPRGIPFNDAGNTMPLTIKSTVGNKTAKGFDVPSVVVLGVDSVIADGQVIGDQNNIVGLGLGSDNGIIVNATTLYAGISTLNNNQGTVTLSGGVPNTPGTVYGLGTGIGASKFKQVTFTTDYNNLGNIIATNATINDGVTVTTGGIAGIGFDGKITLGSVNGNGNVRFADGILSNSTSMIGTTKANNGTVTYLGNAFVGNIGDSDTPVASVRFTGSDSGAGLQGNIYSQVIDFGTYNLGIVNSNIILGGGTTAINGKIDLVTNTLTFASGTSTWGNNTSIETTLTLANGNIGHIVILEGAQVNTTTTGTTTIKVQDNANANFSGTQTYTLIQGGARFNGTLGSPNFAVTGSNRFVNYSLIRAANQDYVITRTNNAENVVTNDIANSPFGGAPGVDQNVTTFVNATNTAAYNNLLLAKNSANSANFVGAIVTDTSAAITNVQLDLAKDIQAQLGNRLGALRYLGTPETAEMAGPEAGAISAAVAAGDEAIDNVAYGIWAKPFYTDAHQSKKGGLAGYKAKTTGVVIGLDTLANDNLMIGAAIGITKTDIKHQDYKKGDKTDVNGFSFSLYGAQQLVKNFFAQGSAIFSLNQVKNKSQRYFFDANGNMSKQIAAGHYDNMTFGGNLTVGYDYNAMQGVLVTPMAGLSYLKSSDENYKETGTTVANKQVNSKFSDRTDLIVGAKVAGSTMNITDLAVYPEVHAFVVHKVTGRLSKTQSVLDGQVTPCINQPDRTTKTSYNLGLSASIRSDAKMEYGIGYDAQISSKYTAHQGTLKVRVNF

SEQ ID NO: 1643 - protein, 309 aa, Streptococcus pneumoniae
MKKLGTLLVLFLSAIILVACASGKKDTTSGQKLKVVATNSIIADITKNIAGDKIDLHSIVPIGQDPHEYEPLPEDVKKTSEADLIFYNGINLETGGNAWFTKLVENAKKTENKDYFAVSDGVDVIYLEGQNEKGKEDPHAWLNLENGIIFAKNIAKQLSAKDPNNKEFYEKNLKEYTDKLDKLDKESKDKFNKIPAEKKLIVTSEGAFKYFSKAYGVPSAYIWEINTEEEGTPEQIKTLVEKLRQTKVPSLFVESSVDDRPMKTVSQDTNIPIYAQIFTDSIAEQGKEGDSYYSMMKYNLDKIAEGLAK

SEQ ID NO: 1644 - protein, 240 aa, Staphylococcus aureus
MNKNVVIKSLATLTILTSVTGIGTTLVEEVQQTAKAENNVTKIQDTNIFPYTGVVAFKSATGFVVGKNTILTNKHVSKNYKVGDRITAHPNSDKGNGGIYSIKKIINYPGKEDVSVIQVEERAIERGPKGFNFNDNVTPFKYAAGAKAGERIKVIGYPHPYKNKYVLYESTGPVMSVEGSSIVYSAHTESGNSGSPVLNSNNELVGIHFASDVKNDDNRNAYGVYFTPEIKKFIAENIDK

SEQ ID NO: 1645 - protein, 260 aa, Mycobacterium bovis; identical to SEQ ID NO: 1530

SEQ ID NO: 1646 - protein, 382 aa, Shigella flexneri
MNNINKIFITFLCIELIIGGGGRLLEPLGIFPLRYLLFVFSFILLIFNLVTFNFSITQKCVSLFIWLLLFPFYGFFVGLLAGNKINDILFDVQPYLFMLSLIYLFTLRYTLKVFSCEIFIKIVNAFALYGSLLYISYIILLNFGLLNFNLIYEHLSLTSEFFFRPDGAFFSKSFYFFGVGAIISFVDKKYLKCLIIVLAILLTESRGVLLFTTLSLLLASFKLHKLYLNTIIIILGSVLFIIMLYMVGSRSEDSDSVRFNDLYFYYKNVDLATFLFGRGFGSFILDRLRIEIVPLEILQKTGVIGVFISLVPMLLIFLKGYFLNSTKTSLMMSLILFFSITVSITNPFLFTPMGIFIIGVVVLWVFSIENIQISNNLTSGAK

SEQ ID NO: 1647 - protein, 420 aa, Salmonella typhi
MSFTTISVIGLGYIGLPTAAAFASRQKQVIGVDINQHAVDTINRGEIHIVEPALGNVVKMAVEGGFLRATTTPVEADAYLIAVPTPFKGDHDPDMAYVEAAAKSIAPVLKKGALVILESTSPVGATEQMAGWLAGMRPDLTFPQQAGEQADVNIAYCPERVLPGQVMVELIKNDRVIGGMTPVCSARASALYKIFLEGECVVTNSRTAEMCKLTENSFRDVNIAFANELSLICAEQGINVWELIRLANRHPRVNILQPGPGVGGHCIAVDPWFIVAQNPQQARLIRTAREVNDGKPHWVVDQVKAAVADCLAATDKRASEVKIACFGLAFKPNIDDLRESPAMGIAQSIARWHSGETLVVEPNIRQLPKKLDGLCTLAKLDAALAAADVLVMLVDHDEFKAIPGDAVHQRYVVDTKGVWR

SEQ ID NO: 1648 - protein, 419 aa, Burkholderia pseudomallei
MSIGVQSSGINISHAELSRLVDAGKSEQGDKAVRDDGRALARADAALAAVVGERVAARRDAVAGSGAQRVELARPKPDAQTRATDRRTVSGLEREHKRLAASQTPRVTGMHDALVQRHVSLDGAKAAHGEGVKRAAGDAPRAAADAPQRFAFADDKAFDAMLALGAAMQKNVQSDLAMQGKLTMLAHDAMMSAAAQDRSIGAAQMTAAIAGGALQATTSLGGAMQQMKSLSTKSMSIEKELKPQAELKQFHAEQALELRGINKPVLSNDEVSHVKIKRDTGETVRHEIDHGGERMSDEHASVLAQEAPARQHRIDMHGMRHEENLVKAGRQQMKGDLLQSGGQIGKNQIDGASAQQQGADRAEQKEDENAQQTAMAAASTRDEAAHRSREAAQKAIDAAKSQVANDNAVAAQVAGNLRT

SEQ ID NO: 1649 - protein, 388 aa, Bacillus cereus; identical to SEQ ID NO: 1283

SEQ ID NO: 1650 - protein, 194 aa, Borrelia burgdorferi; identical to SEQ ID NO: 1634

SEQ ID NO: 1651 - protein, 383 aa, Bacillus pumilus
MNTNKKILILTANYGNGHMQVAKTLYDECKSQGFEHVVVSNLYQESNPIVSEVTQYLYLKSFSIGKQFYRLFYYGVDKIYNKRKFNIYLKMGNKRLDELIQLHNPDIIIITFPMIVVPEYRNKTGKIIPTFNVMTDFCLHKIWVHENIDRYYVATDYVKQKLVEIGTHPSDVKVTGIPIRPQFEADVPKSKIYKKYGLSSNKKVLLIMAGAHGVLKNVKELCEALLLDSEVQIVVVCGKNAALKQSLSDLEQTHPDQLKALGYVEQIDELFRVTDCMITKPGGITLTEATALGVPVILYKPVPGQEKENAHFFEDYGAAIVINRHEDILESVTNLLQDEEKLESMKQNMKSLHLKHSSQTILEDIVEQSDLITNNKTYARALS

SEQ ID NO: 1652 - protein, 362 aa, Escherichia coli
MKILVTGGAGFIGSAVVRHIINNTQDSVINVDKLTYAGNLESLTEIENNERYKFEHADICDSVAIANIFAHHQPDAIMHLAAESHVDRSITGPADFIETNIVGTYILLEEARKYWLALSEDRKGAFRFHHISTDEVYGDLPHPDEVSSDTILPLFTEQTSYSPSSPYSASKASSDHLVRAWRRTYGLPTIVTNCSNNYGPYHFPEKLIPLIILNAIAGKLLPVYGNGEQIRDWLYVEDHARALYEVVTKGVPGETYNIGGHNERKNIDVVKTICRILDELIADKPDGIENFEQLIRYVSDRPGHDLRYAIDASKIKQDLGWVPQETFETGITKTIHWYLNNKEWWQRVMDGSYAGERLGLVE

SEQ ID NO: 1653 - protein, 420 aa, Salmonella typhimurium
MSFTTISVIGLGYIGLPTAAAFASRQKQVIGVDINQHAVDIINRGEIHIVEPALGNVVKMAVEGGFLRATTTPVEADAYLIAVPTPFKGDHDPDMAYVEAAAKSIAPVLKKGALVILESTSPVGATEQMAGWLAGMRTDLTFPQQAGEQADVNIAYCPERVLPGQVMVELIKNDRVIGGMTPVCSARASALYKIFLEGECVVTNSRTAEMCKLTENSFRDVNIAFANELSLICAEQGINVWELIRLANRHPRVNILQPGPGVGGHCIAVDPWFIVAQNPQQARLIRTAREVNDGKPHWVVDQVKAAVTDCLAATDKRASEVKIACFGLAFKPNIDDLRESPAMGIAQSIARWHSGETLVVEPNIRQLPKKLDGLCTLAKLDAALAAADVLVMLVDHDEFKAIPGDAVHQRYVVDTKGVWR

SEQ ID NO: 1654 - protein, 159 aa, Rickettsia sibirica; identical to SEQ ID NO: 1478

SEQ ID NO: 1655 - protein, 237 aa, Shigella boydii
MIDNLIKRTPEINRLLENKRVTGVVTFVNPYSYYKIKEYNKISQLDYIYIDGILLLKLFNFVNGTKIKRHSFDYSSIAKTVFNYSIQNKMKIGLIGSKDYEIEQAVKNIRKKHPGIDISYFHSGYFSSLEEKSSVIDSVIKKSDIIICGLGTPAQEELALDIKIKSNEHLIFTCGGFFTQTASRADFYYPWIKRYNLMWLQRIVLYKHVRKRFFIDYPKFIVRFISENLMKIFTRSN

SEQ ID NO: 1656 - protein, 548 aa, Neorickettsia risticii
MANEVISGEQLQKVIRDAADLVVSSAGVTLGPEGRPVIMSKSYGGPEVTKDGYKVINNLKPEDEKIAKIVELLNQATSQANEKAGDGTTTATILVGNMIKNAHKHIAAQRSRTKLKSGMKRARDEVVKYIQSVAKKINSEEEIAQVGSISANGNSEIGNKIAEAMNKVGKEGVITVEEGKGLDEFSVSVVQGMVFDRGYVSPYFITNPEKMIVEFDNPYVLLANKKLSSIQPMVPLLETIVRSNRAVVIIAEDVEGEALTSLVLSKMRGSLKACAVKAPGFGDRRSEMLEDIRILTGAKTLVSDDLGVTVESLTVEDLGTAKSIIISKDSTTIVDGGGEKTSIDARVKQIKTQIDKTTSDYDKEKLQERLAKLAGGVAVLKVGGATEVEVKERKDRVEDALHATRAAVEEGIVPGGGATLLSAIAVLEKLSSDDDDEQAGINIVKSALKAPISQIVENAGEDASVITYNLLESKDPNRIFDARELKYVDAFKAGIIDPAKVVRVALESAVSVASVLVTTEALIVDLPTKDNGSPSMMPGGGMGGMGGF

SEQ ID NO: 1657 - protein, 235 aa, Staphylococcus epidermidis; identical to SEQ ID NO: 1641

SEQ ID NO: 1658 - protein, 159 aa, Yersinia enterocolitica
MNMKKFVKKPLAIAVLMLASGGMVNMVHAEPTVINSKDISATKTVKEGGSFSVEFKATENEIVSGKLDADTPAFHLVMSDSGEHKGWNVRPTGASEGGQMVSADGTRVDLHTNELSWDNDHWWIDDGSERVEATFFLAAGDEVKAGEYQFTGRVEEYVE

SEQ ID NO: 1659 - protein, 309 aa, Streptococcus sanguinis
MKKLGFLSLLLLAVCTLFACSNQKNASSDSSKLKVVATNSIIADITKNIAGDKIDLHSIVPVGKDPHEYEPLPEDVKKTSQADLIFYNGINLETGGNAWFTKLVKNANKEENKDYYAVSDGVDVIYLEGQSEKGKEDPHAWLNLENGIIYAQNIAKRLIEKDPDNKATYEKNLKAYVEKLTALDKEAKEKFNNIPEEKKMIVTSEGCFKYFSKAYNVPSAYIWEINTEEEGTPDQIKSLVEKLRKTKVPSLFVESSVDDRPMKTVSKDTNIPIHAKIFTDSIADQGEEGDTYYSMMKYNLDKISEGLAK

SEQ ID NO: 1660 - protein, 267 aa, Staphylococcus aureus; identical to SEQ ID NO: 1356

SEQ ID NO: 1661 - protein, 372 aa, Escherichia coli
MGKSIVVVSAVNFTTGGPFTILKKFLAATNNKENVSFIALVHSAKELKESYPWVKFIEFPEVKGSWLKRLHFEYVVCKKLSKELNATHWICLHDITANVVTKKRYVYCHNPAPFYKGILFREILMEPSFFLFKMLYGLIYKINIKKNTAVFVQQFWMKEKFIKKYSINNIIVSRPEIKLSDKSQLTDDDSQFKNNPSELTIFYPAVPRVFKNYELIISAARKLKEQSNIKFLLTISGTENAYAKYIISLAEGLDNVHFLGYLDKEKIDHCYNISDIVCFPSRLETWGLPLSEAKERGKWVLASDFPFTRETLGSYEKKAFFDSNNDDMLVKLIIDFKKGNLKKDISDANFIYRNENVLVGFDELVNFITEEH

SEQ ID NO: 1662 - protein, 330 aa, Salmonella typhimurium
MSHIIKIFPSNIEFSGREDESILDAALSAGIHLEHSCKAGDCGICESDLLAGEVVDSKGNIFGQGDKILTCCCKPKTALELNAHFFPELAGQTKKIVPCKVNSAVLVSGDVMTLKLRTPPTAKIGFLPGQYINLHYKGVTRSYSIANSDESNGIELHVRNVPNGQMSSLIFGELQENTLMRIEGPCGTFFIRESDRPIIFLAGGTGFAPVKSMVEHLIQGKCRREIYIYWGMQYSKDFYSALPQQWSEQHDNVHYIPVVSGDDAEWGGRKGFVHHAVMDDFDSLEFFDIYACGSPVMIDASKKDFMMKNLSVEHFYSDAFTASNNIEDNL

SEQ ID NO: 1663 - protein, 420 aa, Yersinia pestis
MSFETISVIGLGYIGLPTAAAFASRKKKVIGVDVNAHAVETINRGAIHIVEPDLDKVVKIAVEGGYLQAVTKPQAADAFLIAVPTPFKGDHEPDMIFVESAAKSIAPVLKKGDLVILESTSPVGATEQMAQWLAEARPDLSFPQQAGEAADINIAYCPERVLPGQVMVELIQNDRVIGGMTPKCSARASALYKIFLEGECVVTNSRTAEMCKLTENSFRDVNIAFANELSLICDEQGINVWELIRLANRHPRVNILQPGPGVGGHCIAVDPWFIVSQNPQLARLIHTARLVNDGKPLWVVDRVKAAVADCLAASDKRASEVKIACFGLAFKPDIDDLRESPAVGVARLIAEWHVGETLVVEPNVEQLPKSLMGLVTLKDTATALQQADVLVMLVDHKQFKAIKPEDIKQQWIVDTKGVWR

SEQ ID NO: 1664 - protein, 339 aa, Borrelia afzelii
MNKLLLLILFEGVIFLSCSGKSGLESGIPKVSLVIDGTFDDKSFNESALNGVKKLKEEFEIELVLKESSTNSYLSDLEGLKDAGSNLIWLIGYKFSDVAKAVSLQNSEMKYAIIDPVYSNEPIPANLVGMTFRAQEGAFLTGYIAAKVSKTGKIGFLGGIEGDIVDAFRYGYEAGAKYANKDIKIFSQYIGSFSDLEAGRSVATKMYSDGIDIIHHAAGLGGIGAIEVAKELGSGHYIIGVDEDQSYLAPNNVITSTTKDVGRSLNLFTSNYLKTNTFEGGKLINYGLKEGVVGFVRNPKMIPFEVEKEIDSLSSKIINKEVIVPYNKESYEKFLKEFI

SEQ ID NO: 1665 - protein, 436 aa, Pseudomonas aeruginosa
MIDVNTVVEKFKSRQALIGIVGLGYVGLPLMLRYNAIGFDVLGIDIDDVKVDKLNAGQCYIEHIPQAKIAKARASGFEATTDFSRVSECDALILCVPTPLNKYREPDMSFVINTTDALKPYLRVGQVVSLESTTYPGTTEEELLPRVQEGGLVVGRDIYLVYSPEREDPGNPNFETRTIPKVIGGHTPQCLEVGIALYEQAIDRVVPVSSTKAAEMTKLLENIHRAVNIGLVNEMKIVADRMGIDIFEVVDAAATKPFGFTPYYPGPGLGGHCIPIDPFYLTWKAREYGLHTRFIELSGEVNQAMPEYVLGKLMDGLNEAGRALKGSRVLVLGIAYKKNVDDMRESPSVEIMELIEAKGGMVAYSDPHVPVFPKMREHHFELSSEPLTAENLARFDAVVLATDHDKFDYELIKAEAKLVVDSRGKYRSPAAHIIKA

SEQ ID NO: 1666 - protein, 401 aa, Pseudomonas aeruginosa
MFAATRLSRLRHDTSRILSHWILPLGWLALLTGMFWVGDRSDYHRLFYILLAAPTLLYVILQPRLLRPLTGSPLFIAFLAFSSYMMLSLSWSTPENSTGSLLKRPLYIALLFFCAAILALEAPLRLKTATWLAALGAVISAAATLLRYYWDANPLRLTGYGALYNPLLSAHVYGAFTALWLAYWMQSRPILAPLPLISLALLGGLLIATGSRTPLVGLTAALMWLVLAGDRKKALIALALALAGALLGYILYPEVITQRGASFRPEIWADALRQISEHPWLGHGYDHPMRIVLSNGMLLADPHNIELGVLFAGGIIGLLLWVAIYALAFGFSWKNRKSPAVLLASTWLVFGLAAGLTEGNAFLPRPKEHWFLIWIPMALLYALWIQQRFAASRRGEDIAAP

SEQ ID NO: 1667 - protein, 524 aa, Orientia tsutsugamushi
MKKIMLIASAMSALSLPFSASAIELGEEGGLECGPYGKVGIVGGMITGAESTRLDSTDSEGKKHLSLTTGLPFGGTLAAGMTIAPGFRAELGVMYLRNISAEVEVGKGKVDSKGEIKADSGGGTDTPIRKRFKLTPPQPTIMPISIADRDVGVDTDILAQAAAGQPQLTVEQRAADRIAWLKNYAGIDYMVPDPQNPNARVINPVLLNITQGPPNVQPRPRQNLDILDHGQWRHLVVGVTALSHANKPSVTPVKVLSDKITKIYSDIKPFADIAGIDVPDTGLPNSASVEQIQSKMQELNDVLEDLRDSFDGYMGNAFANQIQLNFVMPQQAQQQQGQGQQQQAQATAQEAVAAAAVRLLNGNDQIAQLYKDLVKLQRHAGVKKAMEKLAAQQEEDAKNQGEGDCKQQQGASEKSKEGKGKETEFDLSMIVGQVKLYADLFTTESFSIYAGVGAGLAHTYGKIDDKDIKGHTGMVASGALGVAINAAEGVYVDLEGSYMHSFSKIEEKYSINPLMASVGVRYNF

SEQ ID NO: 1668 - protein, 341 aa, Neisseria meningitidis
MRKILVTGGAGFIGSAVVRHIIRNTQDSVVNLDKLTYAGNLESLTDIADNPRYAFEQVDICDRAELDRVFAQHRPDAVMHLAAESHVDRSIGSAGEFIQTNIVGTFNLLEAARAYRQQMPSEKHEAFRFHHISTDEVYGDLSGTDDLFTETAPYAPSSPYSASKASSDHLVRAWLRTYGLPTIVTNCSNNYGPYHFPEKLIPLMILNALDGKPLPVYGDGMQIRDWLFVEDHARALYQVVTEGVVGETYNIGGHNEKANIEVVKTICALLEELAPEKPAGVARYEDLITFVQDRPGHDARYAVDTAKIRRDLGWQPLETFESGLRKTVQWYLDNKTRRQNA

SEQ ID NO: 1669 - protein, 420 aa, Shigella flexneri; identical to SEQ ID NO: 1637

SEQ ID NO: 1670 - protein, 159 aa, Rickettsia typhi
MKLLSKVMILALAASMLQACNGPGGMNKQGTGTLLGGAGGALLGSQFGHGKGQLVGVGVGALLGAVLGGQIGASMDEQDRKLLELTSQRALESAPSGSNIEWRNPDNGNHGYVTPNKTYRNSTGQYCREYTQTVVIGGKQQTTYGNACRQPDGQWQVAN

SEQ ID NO: 1671 - protein, 253 aa, Escherichia coli
MDDYLVSIIMPSYNAEHTISASISSVLKQTYANWELLVCDDDSSDNTRFKVLEFSDSRIKLLTNEYAKGAAGARNTALKYASGRFIAFLDSDDIWIANKLEMQISMMLKNNISFMYGNYEIINNNSIVGKFVAPQKITYNKLLKNCGIGCLTVVLDRTLLNPFSFPFVHKEDYYLWLSILKDNNISAINCGFICSKYRLSQSSISSNKFKELKRQWDVLGDFVENPLARIYYLLNYIVIGIKKHAFDYKNGKK

SEQ ID NO: 1672 - protein, 393 aa, Yersinia pseudotuberculosis
MRKIMINFPLASSTWDEKELNAIQRIIDSNMFTMGESVKQYEKDFAEYFGSKYSVMVSSGSTANLLMIAALFFTKKPKFKRGDEVIVPAVSWSTTYFPLQQYGLNVRFVDIDKKTLNIDLDKLKSAITEKTKAILAVNLLGNPNDFDAITKITEGKDIFILEDNCESMGARLNGKQAGTYGLMGTFSSFFSHHIATMEGGCVITDDEELYHILLCIRAHGWTRNLPEFNHITGQKSIDPFEESFKFVLPGYNVRPLEMSGAIGIEQLKKLPSFIEMRRKNATIFKELFSSHPYIDIQQETGESSWFGFALILKESSPITRAELVKKLIEAGIECRPIVTGNFLKNKEVLKFFDYTIAGEVTDAEYIDKHGLFVGNHQIDLSEQIKNLFNILKK

SEQ ID NO: 1673 - protein, 243 aa, Staphylococcus saprophyticus
MKKTILASSLAVALGVTGYAATADHNQAHASEENIDQAHLADLAQNNPEQLNEKPLHAGAYNYDFVLGGNEYTFTSDGQTWSWNYTTAGAQSASSNTIQDVTAQATTHTNETSANEVRTQQQSSNTEVAAVEAPKASSNTNVQTAQTSTSTKSTTTTTTTSTSSIDAIANQMAERTGVSASQWKGVIQRESGGNANAVNASSGAYGLFQLLGHGEHAGMSVQDQMDKAVEVYNNQGAGAWVAW

SEQ ID NO: 1674 - protein, 416 aa, Mycoplasma hyopneumoniae; identical to SEQ ID NO: 1378

SEQ ID NO: 1675 - protein, 310 aa, Streptococcus pneumoniae
MKKIASVLALFVALLFGLLACSKGTSSKSSSDKLKVVTTNSILADITKNIAGDKIELHSIVPVGQDPHEYEPLPEDVKKTSQADLIFYNGINLETGGNAWFTKLVKNANKVENKDYFAASDGVEVIYLEGQNQAGKEDPHAWLNLENGIIYAKNIAKQLIAKDPKNKDFYEKNLAAYTEKLSKLDQEAKQAFNNIPAEKKMIVTSEGCFKYFSKAYGVPSAYIWEINTEVEGTPEQIKTLLEKLRQTKVPSLFVESSVDERPMKTVSKDSNIPIFAKIFTDSIAKEGEEGDSYYSMMKWNLEKIAEGLNK

SEQ ID NO: 1676 - protein, 269 aa, Staphylococcus aureus; identical to SEQ ID NO: 1372

SEQ ID NO: 1677 - protein, 264 aa, Escherichia coli
MVYIIIVSHGHEDYIKKLLENLNADDEHYKIIVRDNKDSLLLKQICQHYAGLDYISGGVYGFGHNNNIAVAYVKEKYRPADDDYILFLNPDIIMKHDDLLTYIKYVESKRYAFSTLCLFRDEAKSLHDYSVRKFPVLSDFIVSFMLGINKTKIPKESIYSDTVVDWCAGSFMLVRFSDFVRVNGFDQGYFMYCEDIDLCLRLSLAGVRLHYVPAFHAIHYAHHDNRSFFSKAFRWHLKSTFRYLARKRILSNRNFDRISSVFHP

SEQ ID NO: 1678 - protein, 283 aa, Yersinia pseudotuberculosis
MRIVLTGGSGYIGSSLTPVLIKKYGRVYNIGRNTISEVSINGSKEYCEFTYESLFDSLVELSPDLVINLAAGYYNDSGAPDLNVIDGNLKIPFIILEYFKSCNYGRFINIGSYWEFSCSGRGVKGVNPYGIIKSTVRRLLDYYSKYNVIYTNLILYGSYGDNDHRGKIVDCIIDAVNSNETLKLSPGEQKLNLVYIDDIIEAILYIVSSDNGQYDNETLSIYTPTEHTVKEIVCFINEIKDNNLSLGGGRYRNDEVMAPDYKYRNIFHAKDKLKEYITSKIKK

SEQ ID NO: 1679 - protein, 361 aa, Yersinia pestis; identical to SEQ ID NO: 1319

SEQ ID NO: 1680 - protein, 339 aa, Borrelia burgdorferi
MNKILLLILLESIVFLSCSGKGSLGSEIPKVSLIIDGTFDDKSFNESALNGVKKVKEEFKIELVLKESSSNSYLSDLEGLKDAGSDLIWLIGYRFSDVAKVAALQNPDMKYAIIDPIYSNDPIPANLVGMTFRAQEGAFLTGYIAAKLSKTGKIGFLGGIEGEIVDAFRYGYEAGAKYANKDIKISTQYIGSFADLEAGRSVATRMYSDEIDIIHHAAGLGGIGAIEVAKELGSGHYIIGVDEDQAYLAPDNVITSTTKDVGRALNIFTSNHLKTNTFEGGKLINYGLKEGVVGFVRNPKMISFELEKEIDNLSSKIINKEIIVPSNKESYEKFLKEFI

SEQ ID NO: 1681 - protein, 100 aa, Yersinia enterocolitica
MQLTPREVEKLMIYTLSDVAFKRKARGLKLNYPEAVSIITETAMEGARDGKSVEDVMKEASKVLTKDDVMDGVADLIPNVQVEAIFTDGSRLVTVHDPIK

SEQ ID NO: 1682 - protein, 503 aa, Coxiella burnetii
MNKDILLIVDSMSNERGVSKEVIFEAIEAALAAVTAKRYEEDDVKIRVAIDQKTGDYESFRCWTVVEDTNESLEFPNQEMTLKQAREIDSDLEVGDVIEEPVESVKFGRIAVQQAKQVIVQKVREAERAKIIRQYEKRVGELVIGVVKRVTRESIILDMGENAEALLLREEMIPREAFRINDRLRAYLYSVCQDKKRGPQLLVSRTRPEFLVELFKIEVPEIGEEVIEIKGAARDPGSRAKIAVKTNDGRIDPIGACVGMRGSRVQAVSNELGGERIDIVLWDDNPAQLVINAMAPAEVASIVVDEDSHTMDIAVNKDQLSQAIGRSGQNVRLASELTGWTLNVMSEAEMAQKHEKEAGKIKTAFMEKLDVDEEVADALVQAGFMNLEEVAYVPKEELQGVEGFDEDISAELQRRAGDVLLTQEIAKQELDEKKPAEDLLTLPGMTTELARQLVENEVLTRDDLAEKSVLDLKEIIEIDDEAAANLIMAARAHWFAEEESEKS

SEQ ID NO: 1683 - protein, 532 aa, Orientia tsutsugamushi
MKKIMLIASAMSALSLPFSASAIELEDEVGLECGPYAKVGVVGGMITGAESTRLDSTDSEGKKHLSLTTGLPFGGTLAAGMTIAPGFRAELGVMYLRNISAEVEVGKGEVDSKGEIKADSGGGTDAPIRKPFKLTPPQPTMMPISIADRDFGIDIPNIPQAQAQAAQPPLNDQKRAAARIAWLKNCAGIDYMVKDPNNPGHMMVNPVLLNIPQGNPNPVGQPPQRANQPANFAIHNHEQWRSLVVGLAALSNANKPSASPVKVLSDKIIQIYSDIKPFADIAGINVPDTGLPNSASIEQIQSKIQELGDTLEELRDSFDGYINNAFVNQIHLNFVMPPQAQQQQGQGQQQQAQATAQEAVAAAAVRLLNGSDQIAQLYKDLVKLQRHAGIRKAMEKLAAQQEEDAKNQGKGDCKQQQGASEKSKEGKVKETEFDLSMVVGQVKLYADLVTTESFSIYGGVGAGLAYTYGKIDNKDVKGYTGMVASGALGVAINAAEGVCVDLEAGYMHSFSKVEDKYQVNAFIASACVRYNF

SEQ ID NO: 1684 - protein, 361 aa, Shigella flexneri
MKILVTGGAGFIGSAVVRHIINNTQDSVVNVDKLTYAGNLESLADVSDSERYAFEHADICDAVAMSRIFAQHQPDAVMHLAAESHVDRSITGPAAFIETNIVGTYVLLEAARNYWSALNDEKKKSFRFHHISTDEVYGDLPHPDEANNNEALPLFTETTAYAPSSPYSASKASSDHLVRAWKRTYGLPTIVTNCSNNYGPYHFPEKLIPLVILNALEGKALPIYGKGDQIRDWLYVEDHARALYTVVTEGKAGETYNIGGHNEKKNIDVVLTICDLLDEIVPKEKSYREQITYVADRPGHDRRYAIDADKISRELGWKPQETFESGIRKTVEWYLANTNWVENVKSGTYQSWIEQNYEGRQ

SEQ ID NO: 1685 - protein, 359 aa, Shigella sonnei; identical to SEQ ID NO: 1631

SEQ ID NO: 1686 - protein, 352 aa, Mycobacterium avium
MSFIEKVRKLRGAAATMPRRLAIAAVGASLLSGVAVAAGGSPVAGAFSKPGLPVEYLEVPSPSMGRNIKVQFQGGGPHAVYLLDGLRAQDDYNGWDINTPAFEEFYQSGLSVIMPVGGQSSFYSNWYQPSSGNGQNYTYKWETFLTQEMPLWMQSNKQVSPAGNAAVGLSMSGGSALILAAYYPQQFPYAASLSGFLNPSEGWWPTLIGLAMNDSGGYNANSMWGPSTDPAWKRNDPMVQIPRLVANNTRIWVYCGNGTPSDLGGDNVPAKFLEGLTLRTNEQFQNNYAAAGGRNGVFNFPANGTHSWPYWNQQLMAMKPDMQQVLLSGNTTAAPAQPAQPAQPAQPAQPAT

SEQ ID NO: 1687 - protein, 450 aa, Citrobacter koseri
MSLMQFSGLLVVWLLSTLFIATLTWFEFRRVRFNFNVFFSLLFLLTFFFGFPLTSVLVFRFDVGVAPPEILLQALLSAACFYAVYYVTYKTRLRKRVTDVPRKPLFTMNRVETHLTWVMLMGIALVSVGIFFMHNGFLLFRLHSYSQIFSSEVSGVALKRFFYFFIPAMLVIYFLRQDSKAWLFFLVSTVAFGLLTYMIVGGTRANIIIAFAIFLFIGIIRGWISLWMLVAAGVLGIVGMFWLALKRYGLNVSGDEAFYTFLYLTRDTFSPWENLALLLQNYDNIDFQGLAPIVRDFYVFIPSWLWPGRPGIVLNSANYFTWEVLNNHSGLAISPTLIGSLVVMGGALFIPLGAVAVGLIIKWFDWLYELGNRETNRYKAAILHSFCFGAIFNMIVLAREGLDSFVSRVVFFLVIFGACLLVAKLLFWLFDCAGLVHQRAKPQPQTQVEG

SEQ ID NO: 1688 - protein, 100 aa, Mycobacterium leprae
MAKVKIKPLEDKILVQAGEAETMTPSGLVIPENAKEKPQEGTVVAVGPGRWDEDGAKRIPVDVSEGDIVIYSKYGGTEIKYNGEEYLILSARDVLAVVSK

SEQ ID NO: 1689 - protein, 243 aa, Staphylococcus xylosus
MKKTILASSLAVALGVTGYATTADHNQAHASEENIDKAHLADLAQNNPEELNQKPLHAGAYNYNFVLGGNEYTFTSNGQSWSWNYTAAGAQSATSNSVQDVTTQATTNTNETSASEVSAQKQSSNTPVAAVEAPKASSNTQTSAATRTYKVAQTSAASTGGSVKAQFLAAGGTEAMWNSIVMPESSGNPNAVNPAGYRGLGQTKESWGSGSVASQTKGMINYGESRYGSMEAAMTFRASHGWW

SEQ ID NO: 1690 - protein, 362 aa, Mycoplasma penetrans
MKIKKIKLLKALALTGAFGIVATVPVIVSSCSSTSENNGNGNGNGGTDGNTQQTEVTPAIKSEVSLTGALSKIYDTKTGTDRETTSQLIVKDIKANPENYFTNGEALKDVIASATVTVDGGFTESTFTGEAYSVWSAKADVKKGTYSQASKQLDIKSINDLQTVLGDSAAIKGICDLIPNLKLNNGTDYKVTNNGLSLSEDLLHINVTAKDGQTDVSMDLAIPVSDLNLKIDGLKISVSGTGIKTSELTTNYKFNIGIDNTVKTLTPAAVTLAEADRTNAEKVLEKLGYATVSGSTYTLDQDKLADALGLYNCKFEAVKSEKDSTNNNKYTVTLKATPNDGYFWEDGTNGAKEDISFVATFS

SEQ ID NO: 1691 - protein, 309 aa, Streptococcus oralis
MKKLGTLLVLFLSVIALVACASGKKDATSGQKLKVVATNSIIADITKNIAGDKIDLHSIVPVGQDPHEYEPLPEDVKKTSEADLIFYNGINLETGGNAWFTKLVENAKKTENKDYFAVSEGVDVIYLEGQNEKGKEDPHAWLNLENGMIYAKNIAKQLIAKDPSNKEFYEKNLKDYTEKLDKLDKEAKEKFNNIPAEKKLIVTSEGCFKYFSKAYGVPSAYIWEINTEEEGTPEQIKTLVEKLRQTKVPSLFVESSVDDRPMKTVSQDTNIPIYAQIFTDSIAEEGKEGDSYYSMMKYNLDKIAEGLSK

SEQ ID NO: 1692 - protein, 124 aa, Staphylococcus aureus
MAITKINDCFELLSMVTYADKLKSLIKKEFSISFEEFAVLTYISENKEKEYYLKDIINHLNYKQPQVVKAVKILSQEDYFDKKRNEHDERTVLILVNAQQRKKIESLLSRVNKRITEANNEIEL

SEQ ID NO: 1693 - protein, 254 aa, Escherichia coli
MSLRILDMISVIMAVHRYDKYVDISIDSILNQTYSDFELIIIANGGDCFEIAKQLKHYTELDNRVKIYTLEIGQLSFALNYAVTKCKYSIIARMDSDDVSLPLRLEKQYMYMLQNDLEMVGTGIRLINENGEFIKELKYPNHNKINKILPFKNCFAHPTLMFKKDVILKQRGYCGGFNSEDYDLWLRILNECPNIRWDNLSECLLNYRIHNKSTQKSALAYYECASYSLREFLKKRTITNFLSCLYHFCKALIK

SEQ ID NO: 1694 - protein, 404 aa, Salmonella typhimurium
MLTTSLTLNKEKWKPIWNKALVFLFVATYFLDGITRYKHLIIILMVITAIYQVSRSPKSFPPLFKNSVFYSVAVLSLILVYSILISPDMKESFKEFENTVLEGFLLYTLLIPVLLKDETKETVAKIVLFSFLTSLGLRCLAESILYIEDYNKGIMPFISYAHRHMSDSMVFLFPALLNIWLFRKNAIKLVFLVLSAIYLFFILGTLSRGAWLAVLIVGVLWAILNRQWKLIGVGAILLAIIGALVITQHNNKPDPEHLLYKLQQTDSSYRYTNGTQGTAWILIQENPIKGYGYGNDVYDGVYNKRVVDYPTWTFKESIGPHNTILYIWFSAGILGLASLVYLYGAIIRETASSTLRKVEISPYNAHLLLFLSFVGFYIVRGNFEQVDIAQIGIITGFLLALRNR

SEQ ID NO: 1695 - protein, 359 aa, Citrobacter koseri
MTVLIHVLGSDIPHHNQTVLRFFNDALAATSEHARVFMVAGQDAGLRESCPALSLSFYAGKKTLAEAVIAKAKANRQQRFFFHGQFNTSLWLALLSGGIKPEQFYWHIWGADLYEVSRGLKFRLFYPVRRMAQNRVGCVFATRGDLSYFARQHPRVRGELLYFPTRMDSSLNNMANDRPREGKMTVLVGNSGDRSNEHIAALRAVYQQFGDTVNVIVPMGYPANNDAYIDEVRQAGLALFSAENLHILSEKLEFDAYLALLRQCDLGYFIFARQQGIGTLCLLIQAGVPCVLNRENPFWQDMAEQHLPVLFTTDALNEGVVREAQRQLASVDKSGITFFSPNYLEPWHNALRIAAGEAA

SEQ ID NO: 1696 - protein, 1167 aa, Helicobacter pylori
MTNEAINQQPQTEAAFNPQQFINNLQVAFIKVDNVVASFDPNQKPIVDKNDRDNRQAFEKISQLREEFANKAIKNPTKKNQYFSSFISKSNDLIDKDNLIDTGSSIKSFQKFGTQRYQIFMNWVSHQNDPSKINTQKIRGFMENIIQPPISDDKEKAEFLRSAKQAFAGIIIGNQIRSDQKFMGVFDESLKERQEAEKNGEPNGDPTGGDWLDIFLSFVFNKKQSSDLKETLNQEPVPHVQPDVATTTTDIQSLPPEARDLLDERGNFSKFTLGDMNMLDVEGVADIDPNYKFNQLLIHNNALSSVLMGSHNGIEPEKVSLLYGNNGGPEARHDWNATVGYKNQRGDNVATLINVHMKNGSGLVIAGGEKGINNPSFYLYKEDQLTGSQRALSQEEIQNKVDFMEFLAQNNAKLDNLSKKEKEKFQNEIEDFQKDSKAYLDALGNDHIAFVSKKDKKHLALVAEFGNGELSYTLKDYGKKADKALDREAKTTLQGSLKHDGVMFVDYSNFKYTNASKSPDKGVGATNGVSHLEAGFSKVAVFNLPNLNNLAITSVVRQDLEDKLIAKGLSPQEANKLVKDFLSSNKELVGKALNFNKAVAEAKNTGNYDEVKQAQKDLEKSLKKRERLEKDVAKNLESKSGNKNKMEAKSQANSQKDEIFALINKEANRDARAIAYAQNLKGIKRELSDKLENINKDLKDFSKSFDEFKNGKNKDFSKAEETLKALKGSVKDLGINPEWISKVENLNAALNEFKNGKNKDFSKVTQAKSDLENSIKDVIINQKITDKVDNLNQAVSVAKATGDFSGVEQALADLKNFSKEQLAQQAQKNEDFNTGKNSALYQSVKNGVNGTLVGNGLSKAEATTLSKNFSDIKKELNAKLGNFNNNNNNGLENSTEPIYTQVAKKVKAKIDRLDQIASGLGDVGQAASFLLKRHDKVDDLSKVGLSANHEPIYATIDDLGGPFPLKRHDKVDDLSKVGLSREQKLTQKIDNLNQAVSEAKASHFDNLDQMIDKLKDSTKKNVVNLYVESAKKVPTSLSAKLDNYATNSHTRINSNVKNGTINEKATGMLTQKNSEWLKLVNDKIVAHNVGSAPLSAYDKIGFNQKNMKDYSDSFKFSTRLSNAVKDIKSGFVQFLTNIFSMGSYSLMKASVEHGVKNTNTKGGFQKS

SEQ ID NO: 1697 - protein, 529 aa, Orientia tsutsugamushi
MKKIMLIASAMSALSLPFSASAIELGDEGGLECGPYAKVGVVGGMITGVESTRLDPADAGGKKQLPLTTSMPFGGTLAAGMTIAPGFRAELGVMYLANVKAEVESGKTGSDADIRSGADSPMPQRYKLTPPQPTIMPISIADRDLGVDIPNVPQGGANHLGDNLGANDIRRADDRITWLKNYAGVDYMVPDPNNPQARIVNPVLLNIPQGPPNANPRQAMQPCSILNHDHWRHLVVGITAMSNANKPSVSPIKVLSEKIVQIYRDVKPFARVAGIEVPSDPLPNSASVEQIQNKMQELNDILDEIRDSFDGCIGGNAFANQIQLNFRIPQAQQQGQGQQQQQAQATAQEAAAAAAVRVLNNNDQIIKLYKDLVKLKRHAGIKKAMEELAAQDGGCNGGGDNKKKRGASEDSDAGGASKGGKGKETKETEFDLSMIVGQVKLYADLFTTESFSIYAGLGAGLAYTSGKIDGVDIKANTGMVASGALGVAINAAEGVYVDIEGSYMHSFSKIEEKYSINPLMASFGVRYNF

SEQ ID NO: 1698 - protein, 21 aa, Haemophilus parasuis
VTVYENEGTKVDFDGNLRLLL

SEQ ID NO: 1699 - protein, 488 aa, Bacillus subtilis
MSIKRSAVHTLALLAAAIFGVVLLLGAIHKDIGFMQMAAVLAVLAIGLFLLTLATAFTTKERLFMAVIYILIACTFLNNAFFAIHLGFFSLFLYRLLLIAAGCLHIFGMVRNRTHIERWHGLQVKGILLFFAFWFIYGLVSLLWAKSVTVGLKYLALLAMGIFFIYLIVMYVQKMERLMIVYAIWLVMTVFLMIIGFYNHITHHHLASSTLYSGPEYKQHYPTSVFFNQNDFATFLSISFFFYITMMKNIKNGYIKAIGLVLSLCALYLIFATGSRASLLGIFAGIAVYIFIVLPPVLKRMAIWLSAAGIALFAVLFASKIYSKFWELFLAPQTLHSFHDRLPSNVARANLLKNAWHFFLDSYGFGVGAGNVSYYLEHYAVYDTDNVAEVHNWLVEILANFGLFIMLGYLSVYAYLIWVLYKFYERKLENQSKLITEGLITAMVSFLVSSISPSSVSNLFFHWVFMALVIAAVNVLRRSRQMPEPMYR

SEQ ID NO: 1700 - protein, 183 aa, Salmonella typhimurium
MMIVIKTAIPDVLILEPKVFGDERGFFFESYNQQTFEELIGRKVTFVQDNHSKSKKNVLRGLHFQRGENAQGKLVRCAVGEVFDVAVDIRKESPTFGQWVGVNLSAENKRQLWIPEGFAHGFVTLSEYAEFLYKATNYYSPSSEGSILWNDEAIGIEWPFSQLPELSAKDAAAPLLDQALLTE

SEQ ID NO: 1701 - protein, 361 aa, Yersinia pestis; identical to SEQ ID NO: 1319

SEQ ID NO: 1702 - protein, 325 aa, Mycobacterium smegmatis
MTFIDKIRGHWARRMTVAAVAALLLPGLVGVVGGSATAGAFSRPGLPVEYLMVPSPSMGRDIKVQFQSGGPGSHAVYLLDGLRAQDDFNGWDINTNAFEMFLDSGLSVVMPVGGQSSFYSDWYQPACGNNGCVTYKWETFLTSELPEWLAANRDVAATGNAAIGLSMAGSAALILAAYHPDRFIYAGSMSGFLNPSEGWWPFLINISMGDAGGYKANDMWGPTEDPNSAWKRNDPMVQIPRLVANNTRIWVYCGNGQPNELGGGDLPATFLEGLTIRTNETFRDNYIAAGGNNGVFNFPNNGTHNWAYWGRELQAMVPDLQRVLG

SEQ ID NO: 1703 - protein, 450 aa, Escherichia coli; identical to SEQ ID NO: 1373

SEQ ID NO: 1704 - protein, 544 aa, Synechococcus sp.
MAKRIIYNENARRALEKGIDILAEAVAVTLGPKGRNVVLEKKFGAPQIINDGVTIAKEIELEDHIENTGVALIRQAASKTNDAAGDGTTTATVLAHAVVKEGLRNVAAGANAILLKRGIDKATNFLVEQIKSHARPVEDSKSIAQVGAISAGNDFEVGQMIADAMDKVGKEGVISLEEGKSMTTELEVTEGMRFDKGYISPYFATDTERMEAVFDEPFILITDKKIGLVQDLVPVLEQVARAGRPLVIIAEDIEKEALATLVVNRLRGVLNVAAVKAPGFGDRRKAMLEDIAVLTGGQLITEDAGLKLDTTKLDQLGKARRITITKDNTTIVAEGNEAAVKARVDQIRRQIEETESSYDKEKLQERLAKLSGGVAVVKVGAATETEMKDRKLRLEDAINATKAAVEEGIVPGGGTTLAHLAPQLEEWATANLSGEELTGAQIVARALTAPLKRIAENAGLNGAVISERVKELPFDEGYDASNNQFVNMFTAGIVDPAKVTRSALQNAASIAAMVLTTECIVVDKPEPKEKAPAGAGGGMGDFDY

SEQ ID NO: 1705 - protein, 175 aa, Staphylococcus aureus; identical to SEQ ID NO: 1257

SEQ ID NO: 1706 - protein, 176 aa, Legionella pneumophila
MKAGSFYKLGLLVASAVLVAACSKTPGSADGGAAVGDGDATAQGLGQMTHFAGQEPGESYTTQAPHNQLYLFAYDDSTLASKYLPSVNAQAEYLKTHPGARVMIAGHTDERGSREYNVALGERRADTVAEILRMAGVSRQQIRVVSYGKERPANYGHDEASHAQNRRVEFIYEATR

SEQ ID NO: 1707 - protein, 310 aa, Streptococcus pyogenes; identical to SEQ ID NO: 1627

SEQ ID NO: 1708 - protein, 124 aa, Staphylococcus aureus; identical to SEQ ID NO: 1692

SEQ ID NO: 1709 - protein, 434 aa, Salmonella typhi
MENSERIKKWKEERAKVAQESRASRLQQKEDERALRQTEKSADAKSHHNPDAGWSATDADSVRRASLVIKERRVQQAKQSLRRLFLYIALPLLVIMLMSWILTSHFYSADATFIVQTDASQDNFSGTSFFGAGNKMSEGFQVREFILSKEMMDRMEKELGFLSYFAQDDIALFSRFHAPLGINDDPYRYYLSKVSVAVDIQQGMLRLNVKARSAKQAEFFAQRILSFAEQHVNTVSARMQKERILWLENDVKSAQENLGAARLELLKIQHIQKDIDPKETITAIYQLIAGFETQLAEAKAEYAQLMVNGLDQNPLIPRLSAKIKVLEKQIGEQRNRLSNKLGSQGSSESLSLFEDLRLQSEIAKARWESALQTLQQGKLQALRERQYLLIISQPMAESDTTRYADGTKWLLFFVLLGITYLVTSLLITIRRMRE

SEQ ID NO: 1710 - protein, 246 aa, Klebsiella pneumoniae
MEPVINFSNVTKEYPLYHHIGSGIKDLVFHPKRAFQLLKGRKYLAIEDISFTVAKGEAVALIGRNGAGKSTSLGLVAGVIKPTKGSVTTHGRVASMLELGGGFHPELTGRENIYLNATLLGLRRKEVQQRMERIIEFSELGEFIDEPIRVYSSGMLAKLGFSVISQVEPDILIIDEVLAVGDISFQAKCIKTIREFKKKGVTILFVSHNMSDVERICDRVVWIENHRLREIGSAERIIELYKQAMA

SEQ ID NO: 1711 - protein, 359 aa, Escherichia coli
MTVLIHVLGSDIPHHNRTVLRFFNDALAATSEHAREFMVVGKDDGLSDSCPALSVQFFPGKKSLAEAVIAKAKANRQQRFFFHGQFNPTLWLALLSGGIKPSQFFWHIWGADLYELSSGLRYKLFYPLRRLAQKRVGCVFATRGDLSFFAKTHPKVRGELLYFPTRMDPSLNTMANDRQREGKMTILVGNSGDRSNDHIAALCAVHQQFGDTVKVVVPMGYPPNNEAYIEEVRQAGLELFSEENLQILSEKLEFDAYLALLRQCDLGYFIFARQQGIGTLCLLIQAGIPCVLNRENPFWQDMTEQHLPVLFTTDDLNEDIVREAQRQLASVDKNTIAFFSPNYLQGWQRALAIAAGEVA

SEQ ID NO: 1712 - protein, 1186 aa, Helicobacter pylori
MTNETIDQTRTPDQTQSQTAFDPQQFINNLQVAFIKVDNVVASFDPDQKPIVDKNDRDNRQAFDGISQLREEYSNKAIKNPTKKNQYFSDFIDKSNDLINKDNLIDVESSTKSFQKFGDQRYQIFTSWVSHQKDPSKINTRSIRNFMENIIQPPIPDDKEKAEFLKSAKQSFAGIIIGNQIRTDQKFMGVFDESLKERQEAEKNGGPTGGDWLDIFLSFIFNKKQSSDVKEAINQEPVPHVQPDIATTTTDIQGLPPEARDLLDERGNFSKFTLGDMEMLDVEGVADIDPNYKFNQLLIHNNALSSVLMGSHNGIEPEKVSLLYAGNGGFGDKHDWNATVGYKDQQGNNVATLINVHMKNGSGLVIAGGEKGINNPSFYLYKEDQLTGSQRALSQEEIRNKVDFMEFLAQNNTKLDNLSEKEKEKFQNEIEDFQKDSKAYLDALGNDRIAFVSKKDTKHSALITEFNNGDLSYTLKDYGKKADKALDREKNVTLQGSLKHDGVMFVDYSNFKYTNASKNPNKGVGATNGVSHLEAGFNKVAVFNLPDLNNLAITSFVRRNLENKLTAKGLSLQEANKLIKDFLSSNKELAGKALNFNKAVAEAKSTGNYDEVKKAQKDLEKSLRKREHLEKEVEKKLESKSGNKNKMEAKAQANSQKDEIFALINKEANRDARAIAYTQNLKGIKRELSDKLEKISKDLKDFSKSFDEFKNGKNKDFSKAEETLKALKGSVKDLGINPEWISKVENLNAALNEFKNGKNKDFSKVTQAKSDLENSVKDVIINQKVTDKVDNLNQAVSVAKAMGDFSRVEQVLADLKNFSKEQLAQQAQKNEDFNTGKNSELYQSVKNSVNKTLVGNGLSGIEATALAKNFSDIKKELNEKFKNFNNNNNGLKNSTEPIYAKVNKKKTGQVASPEEPIYTQVAKKVNAKIDRLNQIASGLGGVGQAAGFPLKRHDKVDDLSKVGLSASPEPIYATIDDLGGPFPLKRHDKVDDLSKVGRSRNQELAQKIDNLNQAVSEAKAGFFGNLEQTIDKLKDSTKKNVMNLYVESAKKVPASLSAKLDNYAINSHTRINSNIQNGAINEKATGMLTQKNPEWLKLVNDKIVAHNVGSVSLSEYDKIGFNQKNMKDYSDSFKFSTKLNNAVKDIKSGFTHFLANAFSTGYYCLARENAEHGIKNVNTKGGFQKS

SEQ ID NO: 1713 - protein, 532 aa, Orientia tsutsugamushi; identical to SEQ ID NO: 1683

SEQ ID NO: 1714 - protein, 348 aa, Neisseria gonorrhoeae
MKKSLIALTLAALPVAAMADVTLYGAIKAGVQTYRSVEHTDGKVSKVETGSEIADFGSKIGFKGQEDLGNGLKAVWQLEQGASVAGTNTGWGNKQSFVGLKGGFGTIRAGSLNSPLKNTGANVNAWESGKFTGNVLEISGMAQREHRYLSVRYDSPEFAGFSGSVQYAPKDNSGSNGESYHVGLNYQNSGFFAQYAGLFQRYGEGTKKIEYDDQTYSIPSLFVEKLQVHRLVGGYDNNALYVSVAAQQQDAKLYGAMSGNSHNSQTEVAATAAYRFGNVTPRVSYAHGFKGTVDSANHDNTYDQVVVGAEYDFSKRTSALVSAGWLQGGKGADKIVSTASAVVLRHKF

SEQ ID NO: 1715 - protein, 177 aa, Treponema pallidum
MNMCTDGKKYHSTATSAAVGASAPGVPDARAIAAICEQLRRHVADLGVLYIKLHNYHWHIYGIEFKQVHELLEEYYVSVTEAFDTIAERLLQLGAQAPASMAEYLALSGIAEETEKEITIVSALARVKRDFEYLSTRFSQTQVLAAESGDAVTDGIITDILRTLGKAIWMLGATLKA

SEQ ID NO: 1716 - protein, 298 aa, Burkholderia thailandensis
MKILVTGANGQVGWELARSLAVLGQVVPLARDEADLGRPETLARIVEDAKPDVVVNAAAYTAVDAAESDGAAAKVVNGEAVGVLAAATKRVGGLFVHYSTDYVFDGTKSSPYIETDPTCPVNAYGASKLLGELAVAETGGDWLTFRTTWVFAARGKNFLRTMLRLAKEREEMKIVADQFGAPTWARSIADGTAHALATAMRERAAGAFTSGVYHMTSAGQTSWHGFADAIVASWRAVPGAAPLAVSRIVPIPTSAYPVPARRPANSVLSNEALKERFGIELPDWRYAVGLCVRDLLSQ

SEQ ID NO: 1717 - protein, 367 aa, Escherichia coli
MNLLTVSTDLISIFLFTTLFLFFARKVAKKVGLVDKPNFRKRHQGLIPLVGGISVYAGICFTFGIVDYYIPHASLYLACAGVLVFIGALDDRFDISVKIRATIQAAVGIVMMVFGNLYLSSLGYIFGSWEMVLGPFGYFLTLFAVWAAINAFNMVDGIDGLLGGLSCVSFAAIGMILWFDGQTSLAIWCFAMIAAILPYIMLNLGILGRRYKVFMGDAGSTLIGFTVIWILLETTQGKTHPISPVTALWIIAIPLMDMVAIMYRRLRKGMSPFSPDRQHIHHLIMRAGFTSRQAFVLITLAAALLASIGVLAEYSHFVPEWVMLVLFLLAFLLYGYCIKRAWKVARFIKRVKRRLRRNRGGSPNLTK

SEQ ID NO: 1718 - protein, 325 aa, Mycobacterium tuberculosis; identical to SEQ ID NO: 1290

SEQ ID NO: 1719 - protein, 450 aa, Escherichia coli; identical to SEQ ID NO: 1311

SEQ ID NO: 1720 - protein, 548 aa, Legionella pneumophila
MAKELRFGDDARLQMLAGVNALADAVQVTMGPRGRNVVLEKSYGAPTVTKDGVSVAKEIEFEHRFMNMGAQMVKEVASKTSDTAGDGTTTATVLARSILVEGHKAVAAGMNPMDLKRGIDKAVLAVTKKLQAMSKPCKDSKAIAQVGTISANSDEAIGAIIAEAMEKVGKEGVITVEDGNGLENELYVVEGMQFDRGYISPYFINNQQNMSCELEHPFILLVDKKVSSIREMLSVLEGVAKSGRPLLIIAEDVEGEALATLVVNNMRGIVKVCAVKAPGFGDRRKAMLQDIAILTKGQVISEEIGKSLEGATLEDLGSAKRIVVTKENTTIIDGEGKATEINARIAQIRAQMEETTSDYDREKLQERVAKLAGGVAVIKVGAATEVEMKEKKARVEDALHATRAAVEEGIVAGGGVALIRAQKALDSLKGDNDDQNMGINILRRAIESPMRQIVTNAGYEASVVVNKVAEHKDNYGFNAATGEYGDMVEMGILDPTKVTRMALQNAASVASLMLTTECMVADLPKKEEGVGAGDMGGMGGMGGMGGMM

SEQ ID NO: 1721 - protein, 205 aa, Escherichia coli
MAQLYFYYSAMNAGKSTALLQSSYNYQERGMRTVVYTAEIDDRFGAGKVSSRIGLSSPAKLFNQNSSLFDEIRAEHEQQAIHCVLVDECQFLTRQQVYELSEVVDQLDIPVLCYGLRTDFRGELFIGSQYLLAWSDKLVELKTICFCGRKASMVLRLDQAGRPYNEGEQVVIGGNERYVSVCRKHYKEALQVGSLTAIQERHRHD

SEQ ID NO: 1722 - protein, 283 aa, Bacillus anthracis
MKKKKLFLGTIISCVVLALSACGSSDNVVTSKVGNITEKELSKELRQKYGESTLYQMVLSKALLDKYKVSDEEAKKQVEEAKDKMGDNFKSTLEQVGLKNEDELKEKMKPEIAFEKAIKATVTEKDVKDNYKPEMKVSHILVKDEKTAKEVKEKVNNGEDFAALAKQYSEDTGSKEQGGEITGFAPGQTVKEFEEAAYKLDAGQVSEPVKTTYGYHIIKVTDKKELKPFDEVKDSIRKDIEQQRLQDTTGKWKQQVVNELLKDADIKVNDKEFKNTFEFLEKK

SEQ ID NO: 1723 - protein, 228 aa, Mycobacterium tuberculosis
MRIKIFMLVTAVVLLCCSGVATAAPKTYCEELKGTDTGQACQIQMSDPAYNINISLPSYYPDQKSLENYIAQTRDKFLSAATSSTPREAPYELNITSATYQSAIPPRGTQAVVLKVYQNAGGTHPTTTYKAFDWDQAYRKPITYDTLWQADTDPLPVVFPIVQGELSKQTGQQVSIAPNAGLDPVNYQNFAVTNDGVIFFFNPGELLPEAAGPTQVLVPRSAIDSMLA

SEQ ID NO: 1724 - protein, 207 aa, Mycobacterium leprae
MAEYTLPDLDWDYAALEPHISGEINEIHHTKHHAAYVKGVNDALAKLDEARAKDDHSAIFLNEKNLAFHLGGHVNHSIWWKNLSPNGGDKPTGGLATDIDETFGSFDKFRAQFSAAANGLQGSGWAVLGYDTLGNKLLTFQLYDQQANVSLGIIPLLQVDMWEHAFYLQYKNVKADYVKAFWNVVNWADVQSRYMAATSKTQGLIFD

SEQ ID NO: 1725 - protein, 104 aa, Bartonella quintana
MTETISRNIIFIVIVLLLTALVVSNPSYAANSASSLGNVDSVLQNIVTMMTGTTAKLIAIICVAAVGIGWMSGFIDLRKAAYCILGIGIVFGAPTLVSTLMGSS

SEQ ID NO: 1726 - protein, 437 aa, Myxococcus xanthus
MPESMDAIILKDVVKSFRKRTIRGEYTTFKSELLRWLRGKRQSRDASLITALRGINLTIPKGKTVGIIGRNGSGKSTLLKLITGIYTPTSGDLQINGRISALLDLGAGFHPDFSGRENILINGIILGMTRAEVRARMDEIIAFSELGEFIDEPVRTYSSGMYMRLAFAVATHVDPDILIIDEILAVGDEHFSKKSLAKMMDFKRQGKTIVLVTHELGTVERWCDLAAWIDGGYVRRVGKPSEVTAEYREAISLAEAQSAAFTPPALTEGGGALPQVPSESLPAEGPVRIHRVQLLDARGESLEVLSPEEGLEVRADFSVEGPCEDVDFHVRLQAADGRTLYETSTRSEAVVLSRMPNPGVLRFVVERLGALGGDYSLVVSARASKGESSGRCAFRVVSATEEEGVFRPPHRWLVEPGANSQAGVRFEPGTSPRVEVG

SEQ ID NO: 1727 - protein, 361 aa, Yersinia pseudotuberculosis
MITLTHVLGSDIPHHNLTVLRFFNDVLAKCLPVEQVRHFMVAAKETAPFSSFPQLDINTYSDKKALAEAVIARAQADRSARFFWHGQFNATLWLALLSGKIKPGQVYWHVWGADLYEDAKSLKFRLFYLLRRIAQGRVGHVFATRGDLIHYQQRHPRVPASLLYFPTRMDPALTAINIDKPLAGPMTILVGNSGDTTNRHIEALKAIHQQFGPDVRVIIPMGYPANNEAYIEQVRQAGLALFLQDNLRILTEQIPFDDYLNILRECDLGYFIFNRQQGIGTLCLLTQFGVPFVLSRKNPFWQDLAEQHIPVFFYGDTLDEPLIREAQRQLAGLDKQAIAFFNPNYIEGWKQALALAAGEHP

SEQ ID NO: 1728 - protein, 273 aa, Campylobacter jejuni
MKKFSLVAAALIAGVALNVNAATVATVNGKSISDAEVSEFFAPMLRGQDFKTLPDNQKKALIQQYIMQDLILQDAKKQNLEKDPLYTKELDRAKDAILVNVYQEKILNTIKIDAAKVKAFYDQNKDKYVKPARVQAKHILVATEKEAKDIINELKGLKGKELDAKFSELAKEKSIDPGSKNQGGELGWFDQSTMVKPFTDAAFALKNGTITTTPVKTNFGYHVILKENSQAKGQIKFDEVKQGIENGLKFEEFKKVINQKGQDLLNSAKVEYK

SEQ ID NO: 1729 - protein, 348 aa, Salmonella typhi
MTAYEELRTKLVLAPKRWLITGVAGFIGSGLLEELLFLNQTVIGLDNFSTGYQHNLDDVRTSVSEEQWSRFIFIQGDIRKFTDCQKACKNVDYVLHQAALGSVPRSLKDPIATNSANIDGFLNMLTAARDAHVSSFTYAASSSTYGDHPDLPKIEERIGRPLSPYAVTKYVNELYADVFARSYEFNAIGLRYFNVFGRRQNPNGAYSAVIPRWILSLLKDEPIYINGDGSTSRDFCYIENVIQANLLSATTNDLASKNKVYNVAVGDRTSLNELYYLIRDGLNLWRNEQSRAEPIYKDFRDGDVKHSQADITKIKTFLSYEPEFDIKEGLKQTLKWYIDKHSTLYSSV

SEQ ID NO: 1730 - protein, 15 aa, Haemophilus parasuis
APQANSFYVGAKAGD

SEQ ID NO: 1731 - protein, 1767 aa, Streptococcus pneumoniae
MNKGLFEKRCKYSIRKFSLGVASVMIGAAFFGTSPVLADSVQSGSTANLPADLATALATAKENDGRDFEAPKVGEDQGSPEVTDGPKTEEELLALEKEKPAEEKPKEDKPAAAKPETPKTVTPEWQTVANKEQQGTVTIREEKGVRYNQLSSTAQNDNAGKPALFEKKGLTVDANGNATVDLTFKDDSEKGKSRFGVFLKFKDTKNNVFVGYDKDGWFWEYKSPTTSTWYRGSRVAAPETGSTNRLSITLKSDGQLNASNNDVNLFDTVTLPAAVNDHLKNEKKILLKAGSYDDERTVVSVKTDNQEGVKTEDTPAEKETGPEVDDSKVTYDTIQSKVLKAVIDQAFPRVKEYSLNGHTLPGQVQQFNQVFINNHRITPEVTYKKINETTAEYLMKLRDDAHLINAEMTVRLQVVDNQLHFDVTKIVNHNQVTPGQKIDDESKLLSSISFLGNALVSVSSNQTGAKFDGATMSNNTHVSGDDHIDVTNPMKDLAKGYMYGFVSTDKLAAGVWSNSQNSYGGGSNDWTRLTAYKETVGNANYVGIHSSEWQWEKAYKGIVFPEYTKELPSAKVVITEDANADKNVDWQDGAIAYRSIMNNPQGWEKVKDITAYRIAMNFGSQAQNPFLMTLDGIKKINLHTDGLGQGVLLKGYGSEGHDSGHLNYADIGKRIGGVEDFKTLIEKAKKYGAHLGIHVNASETYPESKYFNEKILRKNPDGSYSYGWNWLDQGINIDAAYDLAHGRLARWEDLKKKLGDGLDFIYVDVWGNGQSGDNGAWATHVLAKEINKQGWRFAIEWGHGGEYDSTFHHWAADLTYGGYTNKGINSAITRFIRNHQKDAWVGDYRSYGGAANYPLLGGYSMKDFEGWQGRSDYNGYVTNLFAHDVMTKYFQHFTVSKWENGTPVTMTDNGSTYKWTPEMRVELVDADNNKVVVTRKSNDVNSPQYRERTVTLNGRVIQDGSAYLTPWNWDANGKKLSTDKEKMYYFNTQAGATTWTLPSDWAKSKVYLYKLTDQGKTEEQELTVKDGKITLDLLANQPYVLYRSKQTNPEMSWSEGMHIYDQGFNSGTLKHWTISGDASKAEIVKSQGANDMLRIQGNKEKVSLTQKLTGLKPNTKYAVYVGVDNRSNAKASITVNTGEKEVTTYTNKSLALNYVKAYAHNTRRDNATVDDTSYFQNMYAFFTTGADVSNVTLTLSREAGDQATYFDEIRTFENNSSMYGDKHDTGKGTFKQDFENVAQGIFPFVVGGVEGVEDNRTHLSEKHNPYTQRGWNGKKVDDVIEGNWSLKTNGLVSRRNLVYQTIPQNFRFEAGKTYRVTFEYEAGSDNTYAFVVGKGEFQSGRRGTQASNLEMHELPNTWTDSKKAKKATFLVTGAETGDTWVGIYSTGNASNTRGDSGGNANFRGYNDFMMDNLQIEEITLTGKMLTENALKNYLPTVAMTNYTKESMDALKEAVFNLSQADDDISVEEARAEIAKIEALKNALVQKKTALVADDFASLTAPAQAQEGLANAFDGNVSSLWHTSWNGGDVGKPATMVLKEPTEITGLRYVPRGSGSNGNLRDVKLVVTDESGKEHTFTATDWPNNNKPKDIDFGKTIKAKKIVLTGTKTYGDGGDKYQSAAELIFTRPQVAETPLDLSGYEAALVKAQKLTDKDNQEEVASVQASMKYATDNHLLTERMVEYFADYLNQLKDSATKPDAPTVEKPEFKLRSLASEQGKTPDYKQEIARPETPEQILPATGESQSDTALILASVSLALSALFVVKTKKD

SEQ ID NO: 1732 - protein, 234 aa, Helicobacter hepaticus
MGKKIAKRLQTLQAKVEPQKVYSIQSGVSAVKSLASAKFDETVEVALRLGVDPRHADQMIRGAVVLPHGTGKKVRVAVFAKGIKADEAKNAGADVVGADDLAEEIKNGNINFDMVIATPDMMALVGKVGRILGPKGLMPNPKTGTVTIDVAKAVANAKSGQVNFRVDKKGIIHAPIGKASFNEEKILDNMLELVRAINRLKPTSAKGKYIRSSSLSLTMSPAIKLDSQELMDMK

SEQ ID NO: 1733 - protein, 246 aa, Salmonella typhimurium; identical to SEQ ID NO: 1293

SEQ ID NO: 1734 - protein, 339 aa, Mycobacterium gordonae
MKLVDRFRGAVTGMPRRLMVGAVGAALLSGLVGFVGGSATASAFSRPGLPVEYLQVPSAAMGRNIKIQFQSGGANSPALYLLDGMRAQDDYNGWDINTPAFEWYNQSGISVVMPVGGQSSFYSDWYNPACGKAGCTTYKWETFLTSELPAYLASNKQVKPTGSAAVGLSMAGSSALILAAYHPDQFVYAGSLSALLDPSQAMGPSLIGLAMGDAGGYKASDMWGPRGPAWQRNDPSLQVGKLVANNSRLWIYCGDGKPSDLGGNNLPAKFLEGFVRTSNLKFQEAYNGAGGHNAVFNFDANGTHDWPYWGAPVQAMKGDLQSTLGATPGAGPATAAASA

SEQ ID NO: 1735 - protein, 450 aa, Escherichia coli; identical to SEQ ID NO: 1311

SEQ ID NO: 1736 - protein, 848 aa, Mycobacterium leprae
MFERFTDRARRVVVLAQEEARMLNHNYIGTEHILLGLIHEGEGVAAKSLDSLGISLEAVRSQVEDIIGQGQQAPSGHIPFTPRAKKVLELSLREALQLGHNYIGTEHILLGLIREGEGVAAQVLVKLGAELTRVRQQVIQLLSGYQGKEAAEAGTGGRGGESGSPSTSLVLDQFGRNLTAAAMESKLDPVIGREKEIERVMQVLSRRTKNNPVLIGEPGVGKTAVVEGLAQAIVHGEVPETLKDKQLYTLDLGSLVAGSRYRGDFEERLKKVLKEINTRGDIILFIDELHTLVGAGAAEGAIDAASILKPKLARGELQTIGATTLDEYRKYIEKDAALERRFQPVQVGEPTVEHTIEILKGLRDRYEAHHRVSITDSAMVAAATLADRYINDRFLPDKAIDLIDEAGARMRIRRMTAPPDLREFDEKIAEARREKESAIDAQDFEKAASLRDREKQLVAQRAEREKQWRSGDLDVIAEVDDEQIAEVLGNWTGIPVFKLTEAETTRLLRMEEELHKRIIGQEDAVKAVSKAIRRTRAGLKDPKRPSGSFIFAGPSGVGKTELSKALANFLFGDDDALIQIDMGEFHDRFTASRLFGAPPGYVGYEEGGQLTEKVRRKPFSVVLFDEIEKAHQEIYNSLLQVLEDGRLTDGQGRTVDFKNTVLIFTSNLGTSDISKPVGLGFTQGSGENDYERMKQKVNDELKKHFRPEFLNRIDDIIVFHQLSRDEIIRMVDLMISRVANQLKVKDMTLELTNKAKALLAKRGFDPVLGARPLRRTIQREIEDQLSEKILFEEVGPGQVVTVDVDNWDGEGPGEDVKFTFTGIRKPSTEPDLAKAGVHSAGGPEPVEQ

SEQ ID NO: 1737 - protein, 154 aa, Mycobacterium abscessus
MMNRVIVGAMGLLAAGAVVVGCSNDKPAGAAQVSSGSNAEVKVDGKDLAGLDLKSVTCVKQGGNINVASAAINGQQGLGVVMTDEATPKVTSLGLVYDGAALAVSEGMGAKVGSADVKVDGKTYTITGEASGADVKNPMAGMITKPFTIKVSCG

SEQ ID NO: 1738 - protein, 267 aa, Caulobacter vibrioides
MKEQGLPAVNIIACASPLLCTTTSSDCVSVWACELEQPLSDALGKLKDHPVDLGPSTQLLTLRPGGPLPRVAVDLRKRVLDVVAAALLTALFAPLLLLAALAIKLESPGPALFRQTRGGLGGAPFQILKLRTMHCREDGPDVAQAQRGDDRVTRVGRILRAASIDELPQLLNVLRGDMSLVGPRPHATAHDDYYSARIPEYAARYQARPGLTGLAQVRGLRGGTETVELMRQRIAADIDYIQTWSLWRDLKIVLRTVPSLLTTDNAY

SEQ ID NO: 1739 - protein, 282 aa, Anaplasma marginale
MNYRELFTGGLSAATVCACSLLVSGAVVASPMSHEVASEGGVMGGSFYVGAAYSPAFPSVTSFDMRESSKETSYVRGYDKSIATIDVSVPANFSKSGYTFAFSKNLITSFDGAVGYSLGGARVELEASYRRFATLADGQYAKSGAESLAAITRDANITETNYFVVKIDEITNTSVMLNGCYDVLHTDLPVSPYVCAGIGASFVDISKQVTTKLAYRGKVGISYQFTPEISLVAGGFYHGLFDESYKDIPAHNSVKFSGEAKASVKAHIADYGFNLGARFLFS

SEQ ID NO: 1740 - protein, 18 aa, Mycobacterium simiae
AEYTLPDLGWDYAASGPG

SEQ ID NO: 1741 - protein, 160 aa, Mycoplasma hyorhinis
MKKSIFSKKLLVSFGSLVALASIPLIAISCGQTNTDKSQQPGSGSSTSGDQSGTTTGGHSGSGTSTSGGQSGTTSGSGTTTGEQTETAPKSPESGSQEATPKSPESGSQEATPKSPESGSQEAAPKSSESGSQEAAPKSSESGSQEAAPKSSESGSQKTT

SEQ ID NO: 1742 - protein, 259 aa, Yersinia enterocolitica
MSLVINDLLKSLHHLPLIFHMAYSDTKARYKRSMLGPLWLTLGAAVGVVGLGLVWSQLLHQERSELIPSLTIGLLLWQFISGCVIESTSTFVKQSQIIRNLQLPFFIHPIQLIVRQSITLAHNLIVLVVVLIIYPQNLGLVSILSIVGFAIVLINLLWISVMLSIIGARFRDVEQIVQALMPIIFFLTPVLYKAGHAGVNQAIIWLNPFTYFITLVRDPIFGNIPAVFVYQITIGMAIVGWGLTLIIFNRFAPRIAFWI

SEQ ID NO: 1743 - protein, 359 aa, Escherichia coli
MTVLIHVLGSDIPHHNRTVLRFFNDALAATSGHAREFMVAGKDDGLSDSCPALSVQFFPGKKSLAEAVIAKAKANRQQRFFFHGQFNPKLWLALLSGGIKPSQFFWHIWGADLYELSSGLRYKLFYPLRRLAQKRVGCVFATRGDLSFFAKTHPKVRGELLYFPTRMDPSLNTMANDRQREGKMTILVGNSGDRSNEHIAALRAVHQQFGDTVKVVVPMGYPPNNEAYIEEVRQAGLELFSEENLQVLSEKLEFDAYLTLLRQCDLGYFIFARQQGIGTLCLLIQAGIPCVLNRENPFWQDMTEQHLPVLFTTDDLNEDIVREAQRQLASVDKNTIAFFSPNYLQGWQRALAIATGEVA

SEQ ID NO: 1744 - protein, 258 aa, Yersinia pestis
MILNRLSTLGIITFGMLSFAANSAQPDIKFASKEYGVTIGESRIIYPLDAAGVMVSVKNTQDYPVLIQSRIYDENKEKESEDPFVVTPPLFRLDAKQQNSLRIAQAGGVFPRDKESLKWLCVKGIPPKDEDIWVDDATNKQKFNPDKDVGVFVQFAINNCIKLLVRPNELKGTPIQFAENLSWKVDGGKLIAENPSPFYMNIGELTFGGKSIPSHYIPPKSTWAFDLPKGLAGARNVSWRIINDQGGLDRLYSKNVTL

SEQ ID NO: 1745 - protein, 578 aa, Salmonella typhi
MITQEEKLAALGKTCLTLKQEKKLAQAVALIDSELPTEALTSLAMLKKAEFLHDVNETERAYALYETLIAQNNDEARYEYARRLYNTGLAKDAQLILKKVSNGVQKKYNNYLGKINKICDLLERLEGKAIPVGTNTCIIAMKHAILFYRNRQPRQLPVGSFGRLALCTGSLGSGGAERQISRLAIEIARKYRQKGKIGGLKVEEPVELIIRSLTPELRQDFFLKEVLEEQVEVLEIAKITGNLFDDATIESPELRLLLSHLPPVCKYGIKHLVPHLCERKLDYLSVWQDSACLMIALAALIAGVPRIQLGLRGLPPVVRKRLFKPEYEPLYQALAVVPGVDFMSNNHCVTRHYADWLKLEAKHFQVVYNGVLPPSTEPSSEVPHKIWQQFTQKTQDADTTIGGVFRFVGDKNPFAWIDFAARYLQHHPATRFVLVGDGDLRAEAQKRAEQLGILERILFVGASRDVGYWLQKMNVFILFSRYEGLPNVLIEAQMVGVPVISTPAGGSAECFIEGVSGFILDDAQTVNLDQACRYAEKLVNLWRSRTGICQQTQSFLQERFTVEHMVGTFVKTIASQPR

SEQ ID NO: 1746 - protein, 393 aa, Neisseria meningitidis
MRKKLTALVLSALPLAAVADVSLYGEIKAGVEGRNIQAQLTEQPQVTNGVQGNQVKVTKAKSRIRTKISDFGSFIGFKGSEDLGEGLKAVWQLEQDVSVAGGGASQWGNRESFIGLAGEFGTLRAGRVANQFDDASQAINPWDSNNDVASQLGIFKRHDDMPVSVRYDSPEFSGFSGSVQFVPAQNSKSAYKPAYYTKDTNNNLTLVPAVVGKPGSDVYYAGLNYKNGGFAGNYAFKYARHANVGRNAFELFLIGSATSDEAKGTDPLKNHQVHRLTGGYEEGGLNLALAAQLDLSENGDKAKTKNSTTEIAATASYRFGNAVPRISYAHGFDLIERGKKGENTSYDQIIAGVDYDFSKRTSAIVSGAWLKRNTGIGNYTQINAASVGLRHKF

SEQ ID NO: 1747 - protein, 568 aa, Bacteroides thetaiotaomicron
MMSVWFIQLAIFAQSRIIEVFPEQGKDIENIALALKKAADCKGRPVTVKFSPGIYQLDRAKSSQVLYYISNTTSELDDPDPTKHIGLYLNTLKNITIDGCGSTLLMNGEMTSFVLDKCEGIVLKNFNIDYKHPTQTEVEVLEEGNDYLIVQVHPTSQYRIVDAQLEWYGDGWSFKNGIAQSYDRISEMTWRSWSPMENLLRTVELRPNVLYLQYKEKPQVGLHTIFQMRDSFRDEVSGFVNRSKGILLENINFYYLGNFGVVCQYSENITVDRCNFAPRPGSGRTNAGFADFIQVSGCRGMIDIKNSRFIGAHDDPINIHGTHLRVIEFLSDNRLKLRFMHDQTFGFEAFFKGDDIELVDSRSLLVVGKCKVKEAKLVTPREMELTLSSPLSSEVMQQKDLVIENVTWTPEVRITNNYFARVPTRGILITTRRKSLIEGNTFYGMQMSGIFVADDGLSWYESGPVHDLTIRQNTFLNCGEPIISIDPENREYKGAVHKNITIEENYFYMRKNSSCAIRAKAVDGLMIRHNLIYSLDTEKNKESDFIQMYNCNEVTIKENRVQLHHLFK

SEQ ID NO: 1748 - protein, 395 aa, Neisseria meningitidis
MRKKLTALVLSALPLAAVADVSLYGEIKAGVEGRNYQLQLTEAQAANGGASGQVKVTKVTKAKSRIRTKISDFGSFIGFKGSEDLGEGLKAVWQLEQDVSVAGGGATQWGNRESFIGLAGEFGTLRAGRVANQFDDASQAIDPWDSNNDVASQLGIFKRHDDMPVSVRYDSPEFSGFSGSVQFVPAQNSKSAYKPAYWTTVNTGSATTTTFVPAVVGKPGSDVYYAGLNYKNGGFAGNYAFKYARHANVGRDAFELFLLGSGSDQAKGTDPLKNHQVHRLTGGYEEGGLNLALAAQLDLSENGDKTKNSTTEIAATASYRFGNAVPRISYAHGFDFIERGKKGENTSYDQIIAGVDYDFSKRTSAIVSGAWLKRNTGIGNYTQINAASVGLRHKF

SEQ ID NO: 1749 - protein, 246 aa, Escherichia coli; identical to SEQ ID NO: 1431

SEQ ID NO: 1750 - protein, 330 aa, Mycobacterium leprae
MKFVDRFRGAVAGMLRRLVVEAMGVALLSALIGVVGSAPAEAFSRPGLPVEYLQVPSPSMGRDIKVQFQNGGANSPALYLLDGLRAQDDFSGWDINTTAFEWYYQSGISVVMPVGGQSSFYSDWYSPACGKAGCQTYKWETFLTSELPQYLQSNKQIKPTGSAAVGLSMAGLSALTLAIYHPDQFIYVGSMSGLLDPSNAMGPSLIGLAMGDAGGYKAADMWGPSTDPAWKRNDPTVNVGTLIANNTRIWMYCGNGKPTELGGNNLPAKLLEGLVRTSNIKFQDGYNAGGGHNAVFNFPDSGTHSWEYWGEQLNDMKPDLQQYLGATPGA

SEQ ID NO: 1751 - protein, 325 aa, Escherichia coli
MRVENNNVSGQNHDPEQIDLIDLLVQLWRGKMTIIISVIVAIALAIGYLAVAKEKWTSTAIITQPDVGQIAGYNNAMNVIYGQAAPKVSDLQETLIGRFSSAFSALAETLDNQEEPEKLTIEPSVKNQQLPLTVSYVGQTAEGAQMKLAQYIQQVDDKVNQELEKDLKDNIALGRKNLQDSLRTQEVVAQEQKDLRIRQIQEALQYANQAQVTKPQIQQTQDVTQDTMFLLGSEALESMIKHEATRPLVFSSNYYQTRQNLLDIDNLDVDKLDIHAYRYVMKPTLPIRRDSPKKAITLILAVLLGGMVGAGIVLGRNALRNYNAK

SEQ ID NO: 1752 - protein, 208 aa, Shigella flexneri
MQILNKILPQVEFAIPRPSFDSLSRNKLVKKILSVFNLKQRFPQKNFGCPVNINKIRDSVIDKIKDSNSGNQLFCWMSQERTTYVSSMINRSIDEMAIHNGVVLTSDNKKNIFAAIEKKFPDIKLDEKSAQTSISHTALNEIASSGLRAKILKRYSSDMDLFNTQMKDLTNLVSSSVYDKIFNESTKVLQIEISAEVLKAVYRQSNTN

SEQ ID NO: 1753 - protein, 139 aa, Mycobacterium indicus pranii
MRNRTVAAGAVLTAALLGACTSHPPTHISSTASVTVNGHDRTFHIVKCGQVQWTRMIDIGSEFSGAKVVVDENAQPATTQSVRIRNVGGFSGMYSQGGDGNADMSMTGDKFTVSGTANGYQTDKPSEPAAATFKIVVTC

SEQ ID NO: 1754 - protein, 199 aa, Streptococcus pyogenes
MFRLLKRACSFLLLFVIYQSFVIHHNVQRVLAYKPMVEKTLAENDTKANVDLVLAMIYTETKGGEADVMQSSESSSGQKNSITDSQASIEHGVNLLSHNLALAEEAGVDSWTAVQAYNFGTAYIDYIAKHGGQNTVDLATTYSKTVVAPSLGNTSGQTYFYYHPLALISGGKLYKNGGNIYYSREVHFNLYLIELMSLF

SEQ ID NO: 1755 - protein, 159 aa, Mycobacterium bovis
MKLTTMIKTAVAVVAMAAIATFAAPVALAAYPITGKLGSELTMTDTVGQVVLGWKVSDLKSSTAVIPGYPVAGQVWEATATVNAIRGSVTPAVSQFNARTADGINYRVLWQAAGPDTISGATIPQGEQSTGKIYFDVTGPSPTIVAMNNGMEDLLIWEP

SEQ ID NO: 1756 - protein, 142 aa, Histophilus somni
MKTFVAKPETVKRDWYVVDATGKTLGRLGHELARRLRGKHKAEYTPHVDTGDYIVVINAEKVAVTGNKETDKLYYWHTGYVGGIKQATFKEMIARRPEAVIEIAVKGMLPKGPLGRAMFRKLKVYAGSEHNHAAQQPQVLDI

SEQ ID NO: 1757 - protein, 168 aa, Mycoplasma hyorhinis
MKKSIFSKKLLVSFGSLVTLAAIPLIAISCGQTNTDQSQQPGSGSTTGGQSGTTTGTDSTTGGQTGSESGTTTGGQTGTTTGGQSDSTSTSKEQGSSDSTSTSKEQGSSDSTSTSKEQGSSDSTSTSKEQGSSDSTSTSKEQGSSDSTSTSKEQGSSDSTSTSNMNTR

SEQ ID NO: 1758 - protein, 239 aa, Yersinia enterocolitica
MTSLIFKNVTMSYPIYNAHSQSLRNQLVRVSTGGRIGGSRGEVVTVTALDNISFELNSGDSVGLIGHNGAGKSTLLRTMAGIYPASSGEIIREGSVATVFELGAGMDPELSGYENIMRMLLLLGNSVASAKSKIPEIEEFCELGDFLVLPVRTYSSGMTMRLMFAVATSMRPEILLIDEMFGTGDAAFQEKAEKRMRDWIAGSDIFVFASHDRSLIKKLCNRIFRLEHGLIYEESMDIL

SEQ ID NO: 1759 - protein, 246 aa, Citrobacter koseri
MTDNTTAPLYSLRGLQLIGWRDMQHALNYLFADGQMKQGTLVAINAEKMLTAEDDPEVRALIDAAEFKYADGISVVRSVRKKFPQAQVSRVAGADLWEELMARAGKEGTPVFLVGGKPEVLAQTEAKLRAQWNVNIVGSQDGYFKPEQRQALFERIHASGAKIVTVAMGSPKQEILMRDCRVIHPQALYMGVGGTYDVFTGHVKRAPKMWQTLGLEWLYRLLSQPSRITRQLRLLRYLRWHYTGNL

SEQ ID NO: 1760 - protein, 329 aa, =Helicobacter pylori
MSNSMLDKNKAILTGGGALLLGLIVLFYLAYRPKAEVLQGFLEAREYSVSSKVPGRIEKVFVKKGDHIKKGDLVFSISSPELEAKLAQAEAGHKAAKALSDEVKRGSRDETINSARDVWQAAKSQATLAKETYKRVQDLYDNGVASLQKRDEAYAAYESTKYNESAAYQKYKMALGGASSESKIAAKAKESAALGQVNEVESYLKDVKATAPIDGEVSNVLLSGGELSPKGFPVVLMIDLKDSWLKISVPEKYLNEFKVGKEFEGYIPALKKSTKFRVKYLSVMGDFATWKATNNSNTYDMKSYEVEAIPLEELENFRVGMSVLVTIKP

SEQ ID NO: 1761 - protein, 391 aa, Staphylococcus haemolyticus
MVTQNKKILIITGSFGNGHLQVTQSVVNQLNEMNLSHLSVIEHDLFMEAHPILTSICKKWYINSFKYFRNMYKNFYYSRPDELDKCFYKYYGLNKLINLLLKEKPDLILLTFPTPVMSVLTEQFNINIPIATVMTDYRLQKNWITPNSHRYYVATDDTKRDFVNAGIPASDIKVTGIPISDKFESDIDKVAWLKKHNLNPDKPTILMSAGAFGVSKGFDYMIDNILQKSPQSQIVMVCGRSKGLKRTLEMQFKSYDNVLILGYTKHMNEWMASSQLMITKPGGITISEGLTRSLPMIFLNPAPGQELENALYFQDKSYGKIANTPEEAIDIVSDLTNHEYRLQAMTNKMTEEKVNHSTYRLCTDLLNILDSSSQQQEIYGKVPLYARFFVK

SEQ ID NO: 1762 - protein, 1656 aa, Rickettsia japonica
MAQKPNFLKKLISAGLVTASTATIVASFAGSAMGAAIQQNRTTNGVATTVDGVGFDQTVALANVAVAPNAVITANANNGINLNTPAGSFNGLFLSNANNLAVTVSEDTTLGFINNAANNANRFNLTLDAGKTLTITGQGITNVQSAATHNAQNIVAKFNGGAAIANNDLSGLGTIDFGAAASTLVFDLANPTTQKAPLILADNALIVNGANGTLNVTNGFIQVSDKSFATVKAINIGDGQGFMFNTNATNANALNLQAGGTTINFNGTDGTGRLVLLSKNGAATDFNVTGSLGGNLKGIIELNTVAINGQLIANAGPANAVIGTNNGAGRAAGFVVSVDNGKAATIDGQVYAKDMVIQSANANGQVNFRHIVDVGIDGTTAFKTAASIVAITQNSNFGTTDFGNLAAQVTVPDTMTLTGNFTGDANNPGNTAGVITFAANGTLASASADANVAVTNNITAIEASGVGVVQLSGTHTAELRLGNAGSVFKLADGTVINGKVNQTVLVGGVLAAGAITLDGSATITGDIGNGGGGAALQSITLANDATKTLTLGGANIISANGGTINFQANGGTIKLTSTQNNIVVDCDLAIATDQTGVVDASSLTNAQTLTISGTIGIIGANNTTLGQFNIGSSKTTLNGGNVAINELVIGNNGSVQFAHNTYLITRTTNAAGQGKIIFNPVVNNNTTLAAGTNLGSAANPLAEINFGSKGARADTVLNVGEGVNLYATNITTTDANVGSFVFNAGGKNIVSGTVGGQQGNKFNTVALDNGTTVKFLGNATFNGNTTIAANSTLQISGNYTADFIASADGTGIVEFVNTGPINVTLNKQAVPVNALKQITVSGPGNVVVNEIGNAGNYHGAMTDTIAFENSSLGAVLFLPSGIPFNDAGNTIPLTIKSTVGNETAEGFSVPSVIVSGVDSVIADGQVIGDQNNIVGLGLGSDNGIIVNATTLYAGIGTINNNQGTVTLSGGVPNTPGTVYGLGTGIGASKFKQVTFTTDYNNLGNIIATNTTINDGVTVTTGGIAAGGIAGTDFDGKITLGSVNGNANVRFADGIFSNSTSMIVTTKANNGTVTYLGNAFVGNIGDSDTPVASVRFTGSNNGAGLKGNIYSQVIDFGTYNLGIVNSNVILGGSTTAINGKIDLLTNTLTFAGGTSTWGNNTSIETTLTLANGNIGHIVIAEGAQVNATTTGTTTINVQDNANANFSGTQTYTLIQGGARFNGTLGGPNFTVTGSNRFVNYGLIRAANQDYVITRTNNAENIVTNDITNSPFGGAPGVGQNVTTFVNATNTAAYNNLLLAKNSADSANFVGTIVTDTSAAITNAQLDVAKDIQAQLGNRLGALRYLGTPEMVGSEAGAIPAAVAAGDEAVDNVAYGIWAKPFYTDAHQSKKGGLAGYKAKTTGIVIGLDTLANNNLMIGAAIGITKTDIKHQDYKKGDKTDVNGFSFSLYGAQQFVENFFAQGSAIFSLNQVKNKSQRYFFDANGNMSKQIAAGNYDNMTFGGNLTVGYDYNAMQGVLVTPMAGLSYLKSSDENYKETGTTVANKQVNSKFSDRTDLIVGAKVAGGTMNITDFAVYPEVHAFVVHKVTGRLSKTQSVLDGQVTPCISQPDRTAKTSYNLGLSASIRSDAKMEYGIGYDAQIASKYTAHQGTLKVRVNF

SEQ ID NO: 1763 - protein, 727 aa, Streptomyces griseoplanus
MGTATAQPALRPQTSTVIGGLHGAAVLDNTGRTVIDVTDFGADPSGKADSAAAVSAAMAHAKTVGGPTTLHFPTGTYHIWPERTPKRELYVSNTVGSDQAFRTKNIGILVEDMRDVVVDGGGSRIVNHGFQTVFAAIRSSDVRFTNFSQTWVAPKTVDITVADAGVVSGQAYRIIDIPETYDYAVEGTSVRWNGERGPATGQPYWTGTNSFDYSQVHDPATNRTWRTSNPVFPERHEDHRPRRRQVRITYGDSTAPGDRGYVYQMREVTRDTPGALFWESSRVTVDHLRLGYLHGFGIVGQLSEDIGIDSVTFKADRGSGRVTSGFADHIQMSGVKGTVRITNSVFDNPQDDPINIHGTYLQATAAERETLQLRYMHNETSGFPQFYPGDTIELVDKRTMLAAPGATAKVVSVTGPTGSGVPAGTDPDTYLRTMTVVLDRTLPAAVLAAPGDYVAENTTYTPTVEITGNTFQAVPTRGILVTTRRPVRIENNRFDGMSMASIYISSDARSWYESGPVRNVTIRGNVFDRPASPVIFFDPTNQDFVAGQPVHRNVLIEDNDFNLTGGTILSGRGVGGLTFRDNRVERYPHLRLTGPSRALRVGDTTTVTTDAPPPSHTSPLFTFDGADDITLANNTYGNGFNKRVNTANMDVSEITVTADGLALNADSISSAPVAVSYSSSRPKVATVDSEGVVKALSGGTTSITARATIGGVRVTSNPVKVVVATER

SEQ ID NO: 1764 - protein, 392 aa, Neisseria meningitidis
MRKKLTALVLSALPLAAVADVSLYGEIKAGVEGRNYQLQLTEAQAANGGASGQVKVTKVTKAKSRIRTKISDFGSFIGFKGSEDLGDGLKAVWQLEQDVSVAGGGATQWGNRESFIGLAGEFGTLRAGRVANQFDDASQAIDPWDSNNDVASQLGIFKRHDDMPVSVRYDSPEFSGFSGSVQFVPIQNSKSAYTPAYYTKDTNNNLTLVPAVVGKPGSDVYYAGLNYKNGGFAGNYAFKYARHANVGRNAFELFLIGSGSDQAKGTDPLKNHQVHRLTGGYEEGGLNLALAAQLDLSENGDKTKNSTTEIAATASYRFGNAVPRISYAHGFDFIERGKKGENTSYDQIIAGVDYDFSKRTSAIVSGAWLKRNTGIGNYTQINAASVGLRHKF

SEQ ID NO: 1765 - protein, 246 aa, Escherichia coli
MNNNTTAPTYTLRGLQLIGWRDMQHALDYLFADGQLKQGTLVAINAEKMLTIEENAEVRELINAAEFKYADGISVVRSVRKKYPQAQVSRVAGADLWEELMARAGKEGTTVFLVGGKPEVLAQTEAKLRNQWNVNIVGSQDGYFKPEQRQALFERIHASGAQIVTVAMGSPKQEIFMRDCRLVHPDALYMGVGGTYDVFTGHVKRAPKIWQTLGLEWLYRLLSQPSRIKRQLRLLRYLRWHYTGNL

SEQ ID NO: 1766 - protein, 147 aa, Mycobacterium avium
MLMRSDPFRELDRLTNQVLGTPTRPAVMPMDAWRVGRRLVVEFDLPGIDAESLDIDIERNVLTVRAERPALDPNREMLATERPRGVFSRELVLGDNLDTDKIEASYRDGVLSLHIPVDEKARPRKIAVGAARHPEPSPKTAREVVNA

SEQ ID NO: 1767 - protein, 450 aa, Escherichia coli
MSLLQFSGLFVVWLLCTLFIATLTWFEFRRVRFNFNVFFSLLFLLTFFFGFPLTSVLVFRFDVGVAPPEILLQALLSAGCFYAVYYVTYKTRLRKRVADVPRRPLFTMNRVETNLTWVILMGVALVSVGIFFMHNGFLLFRLNSYSQIFSSEVSGVALKRFFYFFIPAMLVVYFLRQDSKAWLFFLVSTVAFGLLTYMIVGGTRANIIIAFAIFLFIGIIRGWISLWMLAAAGVLGIVGMFWLALKRYGMNVSGDEAFYTFLYLTRDTFSPWENLALLLQNYDNIDFQGLAPIVRDFYVFIPSWLWPGRPSMVLNTANYFTWEVLNNHSGLAISPTLIGSLVVMGGALFIPLGAIVVGLIIKWFDWLYELGNREPNRYKAAILHSFCFGAIFNMIVLAREGLDSFVSRVVFFIVVFGACLMIAKLLYWLFESAGLIHKRTKSSLRTQVEG

SEQ ID NO: 1768 - protein, 155 aa, Shigella flexneri
MSLNITENESISTAVIDAINSGATLKDINAIPDDMMDDIYSYAYDFYNKGRIEEAEVFFRFLCIYDFYNVDYIMGLAAIYQIKEQFQQAADLYAVAFALGKNDYTPVFHTGQCQLRLKAPLKAKECFELVIQHSNDEKLKIKAQSYLDAIQDIKE

SEQ ID NO: 1769 - protein, 233 aa, Mycobacterium bovis
MNDGKRAVTSAVLVVLGACLALWLSGCSSPKPDAEEQGVPVSPTASDPALLAEIRQSLDATKGLTSVHVAVRTTGKVDSLLGITSADVDVRANPLAAKGVCTYNDEQGVPFRVQGDNISVKLFDDWSNLGSISELSTSRVLDPAAGVTQLLSGVTNLQAQGTEVIDGISTTKITGTIPASSVKMLDPGAKSARPATVWIAQDGSHHLVRASIDLGSGSIQLTQSKWNEPVNVD

SEQ ID NO: 1770 - protein, 204 aa, Streptococcus pneumoniae
MFKRIRRVLVLAVFLFAGYKAYRVHQDVKQVMTYQPMVREILSEQDTPANEELVLAMIYTETKGKEGDVMQSSESASGSTNTINDNASSIRQGIQTLTGNLYLAQKKGVDIWTAVQAYNFGPAYIDFIAQNGKENTLALAKQYSRETVAPLLGNRTGKTYSYIHPISIFHGAELYVNGGNYYYSRQVRLNLYIIKCFTLFSTSG

SEQ ID NO: 1771 - protein, 193 aa, Mycobacterium tuberculosis
MKVKNTIAATSFAAAGLAALAVAVSPPAAAGDLVGPGCAEYAAANPTGPASVQGMSQDPVAVAASNNPELTTLTAALSGQLNPQVNLVDTLNSGQYTVFAPTNAAFSKLPASTIDELKTNSSLLTSILTYHVVAGQTSPANVVGTRQTLQGASVTVTGQGNSLKVGNADVVCGGVSTANATVYMIDSVLMPPA

SEQ ID NO: 1772 - protein, 292 aa, Shigella flexneri
MKTRKGIILAGGSGTRLYPVTMAVSKQLLPIYDKPMIYYPLSTLMLAGIRDILIISTPQDTPRFQQLLGDGSQWGLNLQYKVQPSPDGLAQAFIIGEEFIGGDDCALVLGDNIFYGHDLPKLMDTAVNRESGATVFAYHVNDPERYGVVEFDDNGTAISLEEKPQEPKSNYAVTGLYFYDNDVVEMAKNLKPSARGELEITDINRIYMDQGRLSVAMMGRGYAWLDTGTHQSLIEASNFIATIEERQGLKVSCPEEIAHRKGFIDAEQVKVLAEPLKKNAYGQYLLKMIKGY

SEQ ID NO: 1773 - protein, 243 aa, Mycoplasma hyorhinis
MKKSIFSKKLLVSFGSLVTLAAIPLIAISCGQTTDNLSQSQQPGSGTGSGSGTNTENGSNNGSGSGTTNSSGGTNQSGSASGNGSSNSSVSTPDGQHSNPSNPTTSDPKESNPSNPTTSDPKESNPSNPTTSDGQHSNPSNPTTSDPKESNPSNPTTSDGQHSNPSNPTTSDGQHSNPSNPTTSDGQHSNPSNPTTSDGQHSNPSNPTTSDGQHSNPSNPTTSDGQHSNPSNPTTSDGQNQNK

SEQ ID NO: 1774 - protein, 552 aa, Staphylococcus aureus
MKGCLATMDKELWIERANDSLVKHFYEQQSDIEQREGFESKLTFGTAGIRGKFGLGEGRLNKFTIEKLALGLARYLNAQTNSPTIVIHYDIRHLSTEFAQIIANVLANHQITVYLPDTYKTTPELSFAVRNLNTTAGIMITASHNPKDYNGIKVYGSDGAQLSTDASELASRYIEEVGDPLQIDIPISKQNTSYIKPFPKSVTDDYMKHIQNMIGYIPKSDLQVVFTSLHGTSVPIVPELLQSLNFNQFNLVEAQCKPDPNFSSVQSANPEDHRAFDQAVELANKSHADLLISTDPDADRLGIAERDAHGHITYFNGNQIGALLLNYRIQQTSQLRHRLMIQSIVSSELTKSLARYNNVEYKEVLTGFKFIAQEIRQLDDHQNMIFAFEESYGFLSEPFVRDKDAVQIVPLIIKYASELKLYGKTLKDELEQIYQTVGRHEDTLFSHTLEGFEGKKKINAIMTKFRSNPPQEIQGLKVKAIEDYLTSEVYHLDKDTTSQINSPKSNVIRVLFDEGFIALRPSGTEPKIKLYVSLKCPNFDDVAQKINAMIFS

SEQ ID NO: 1775 - protein, 359 aa, Escherichia coli
MTVLIHVLGSDIPHHNRTVLRFFNDALAATSEHAREFMVVGKDDGLSDSCPALSVQFFPGKKSLAEAVIAKAKANRQQRFFFHGQFNPTLWLALLSGGIKPSQFFWHIWGADLYELSSGLRYKLFYPLRRLAQKRVGCVFATRGDLSFFAKTHPKVRGELLYFPTRMDPSLNTMANDRQREGKMTILVGNSGDLSNEHVAALRAVHQQFGDTVKVVVPMGYPPNNEAYIEEVRQAGLELFSEENLQILSEKLEFDAYLALLRQCDLGYFIFARQQGIGTLCLLIQAGIPCVLNRENPFWQDMTEQHLPVLFTTDDLNEDIVREAQRQLASVDKNTIAFFSPNYLQGWQRALAIAAGEGA

SEQ ID NO: 1776 - protein, 397 aa, Coxiella burnetii
MSKEKFVREKPHVNVGTIGHVDHGKTTLTAALTKVLSEKYGGEKKAFDQIDNAPEERARGITIATSHVEYQSDKRHYAHVDCPGHADYVKNMITGAAQMDGAILVVSAADGPMPQTREHIVLAKQVGVPNIVVYLNKADMVDDKELLELVEMEVRDLLNSYDFPGDETPIIVGSALKALEGDKSEVGEPSIIKLVETMDTYFPQPERAIDKPFLMPIEDVFSISGRGTVVTGRVERGIIKVGDEIEIVGIKDTTKTTCTGVEMFRKLLDEGQAGDNVGILLRGTKREEVERGQVLAKPGSITPHKKFEAEIYVLSKEEGGRHTPFLQGYRPQFYFRTTDVTGQLLSLPEGIEMVMPGDNVKVTVELIAPVAMDEGLRFAVREGGRTVGAGVVTKIIE

SEQ ID NO: 1777 - protein, 388 aa, Bacillus cereus
MIKNPKVLILTAHYGNGHVQVAKTLEQTFRQKGIKDVIVCDLFGESHPVITDITKYLYLKSYTIGKELYRLFYYGVEKIYDKKIASWYANFGRKRLKLLLQAEKPDIVINTFPIIAVPELKKQTGISIPVYNVLTDFCVHKIWIHREVDRYFVATDHVKKVMVDIGVPAEQIVETGIPIRSSFELKINSDIIYNKYQLCKNKKILLIVAGAHGVLGSVKELCQSFMSVPDLQVVVVCGKNEALKQDLLGLQEKNPDALKVFGYVENIDELFRVTSCMITKPGGITLSEAAALQVPVILYKPVPGQENENAMYFERKGAAVVIRDDSEVFAKTEALLQDDMRLLQMKEAMKSIYRPEPADHIVDTILAENHVEPNHIPIKSPALAQSFT

SEQ ID NO: 1778 - protein, 487 aa, Mycobacterium tuberculosis
MTSPHFAWLPPEINSALMFAGPGSGPLIAAATAWGELAEELLASIASLGSVTSELTSGAWLGPSAAAMMAVATQYLAWLSTAAAQAEQAAAQAMAIATAFEAALAATVQPAVVAANRGLMQLLAATNWFGQNAPALMDVEAAYEQMWALDVAAMAGYHFDASAAVAQLAPWQQVLRNLGIDIGKNGQINLGFGNTGSGNIGNNNIGNNNIGSGNTGTGNIGSGNTGSGNLGLGNLGDGNIGFGNTGSGNIGFGITGDHQMGFGGFNSGSGNIGFGNSGTGNVGLFNSGSGNIGIGNSGSLNSGIGTSGTINAGLGSAGSLNTSFWNAGMQNAALGSAAGSEAALVSSAGYATGGMSTAALSSGILASALGSTGGLQHGLANVLNSGLTNTPVAAPASAPVGGLDSGNPNPGSGSAAAGSGANPGLRSPGTSYPSFVNSGSNDSGLRNTAVREPSTPGSGIPKSNFYPSPDRESAYASPRIGQPVGSE

SEQ ID NO: 1779 - protein, 356 aa, Treponema pallidum
MRGTYCVTLWGGVFAALVAGCASERMIVAYRGAAGYVPEHTFASKVLAFAQGADYLQQDVVLSKDNQLIVAQSHILDNMTDVAEKFPRRQRADGHFYVIDFTVEELSLLRATNSFYTRGKRHTPVYGQRFPLWKPGFRLHTFEEELQFIRGLEQTTGKKIGIYSEIKVPWFHHQEGKDIAALTLALLKKYGYQSRSDLVYVQTYDFNELKRIKRELLPKYEMNVKLIQRVAYTDQRETQEKDSRGKWINYNYNWMFEPGGMQKIAKYADGVGPDWRMLIENEWSKVGAVRLSPMVSAIQDAKLECHVHTVRKETLPSYARTMDEMFSILFKQTGANVVLTDFPDLGVKFLGKPARY

SEQ ID NO: 1780 - protein, 2021 aa, Rickettsia conorii
MANISPKLFQKAIQQGLKAALFTTSTAAIMLSSSGALGIAVSGVIATNNNAAFSDNVGNNWNEITAAGVANGTPARGPQNNWAFTYGGDYTITADVADHIITAINVADTTPIGLNIAQNTVVGSIVTGGNLLPVTITAGKSLTLNGNNADAANHGFGAPADNYTGLGNIALGGANAALIIQSAAPAKITLAGNINGGGIITVKTDAAINGTIGNTNALATVNVGAGIATLEGAIIKATTTKLTNAASVLTLTNVNAVLTGAIDNTTGVDNVGVLNLNGALSQVTGNIGNTNALATISVGAGKATLGGAVIKATTTKLTDNASAVTFTNPVVVTGAIDNTGNANNGIVTFTGDSTVTGNIGNTNALATISVGAGKATLGGAIIKATTTKLTDNASAVTFTNPVVVTGAIDNTGNANNGIVTFTGDSTVTGNIGNTNALATISVGAGKATLGGAIIKATTTKLTDNASAVTFTNPVVVTGAIDNTGNANNGIVTFTGDSTVTGNIGNTNALATISVGAGKATLGGAIIKATTTKLTDNASAVTFTNPVVVTGAIDNTGNANNGIVTFTGDSTVTGNIGNTNALATISVGAGKATLGGAIIKATTTKLTDNASAVTFTNPVVVTGAIDNTGNANNGIVTFTGNSTVTGNIGNTNALATVNVGAGIATLEGAVIKATTTKLTNAASVLTLTNVNAVLTGAIDNTTGVDNVGVLNLNGALSQVTGNIGNTNALATISVGAGKATLGGAVIKATTTKLTDNASAVTFTNPVVVTGAIDNTGNANNGIATFTGDSTVTGNIGNTNALATVNVGAGLLRVQGGVVKSNTINLTDNASAVTFTNPVVVTGAIDNTGNANNGIVTFTGDSTVTGNIGNTNALATISVGAGKATLGGAIIKATTTKLTDNASAVTFTNPVVVTGAIDNTGNANNGIVTFTGDSTVTGNIGNTNALATVNVGAGVTLQAGGSLDANNIDFGARSTLEFNGPLDGGGNAIPYYFKGAIANGNNAILNVNTKLLTAYHLTIGTVAEINIGAGNLFAIDASAGDVTILNAQDIHFRALDSALVLSNLTGVGVNNILLAADLVAPGVDEGTVVFDGGVNGLNIGSNVAGAARNIGDVGGNKFNTLLIYNAVTITDDVNLEGIQNVLINNNADFTSSTAFNAGTIQINDATYTIDANNGNLNIPAGNIKFAHADAQLILQNSSGNDRTITLGANIDPDNDDEGIVILNSVTAGKKLTIAGGKTFGGAHKLQDIVFKGEGDFGTAGTTFNTTNIVLDITGQLELGATTANVVLFKDAVQLTQTGNIGGFLDFNAKNGTVTLNNNVNVAGTVKNTGGTNNGTLIVLGASNLNRVNGIAMLKVGAGNVTIAKGGNVKIGEIQGTGTNTLTLPAHFKLTGSINKTGGQALKLNFMNGGSVSGVVGTAANSVGDITTAGATSFASSVNAKGTATLGGTTSFAHTFTNTGAVTLAKGSITSFAKNVTATSFVANSATINFGNSLAFNSNITGSGTTLTLGANQVTYTGTGSFTDTLTLNTTFDGAAKSGGNILIKSGSTLDLSGVSNLALVVTATNFDMNNISPDTKYTVISAETAGGLKPTPKENVKITINNDNRFVDFTFDASTLTLFAEDIAAGVIDEDFAPGGPLANIPNAANIKKSLELMEDAPNGSDARQAFNNFGLMTPLQEADATTHLMQDVVKPSDTIAAVNNQVVASNISSNITALNARMDKVQAGNKGPVSSGDEDMDAKFGAWISPFVGNATQKMCNSISGYKSDTTGGTIGFDGFVSDDLVLGLAYTRADTDIKLKNNKTGDKNKVESNIYSLYGLYSVPYENLFVEAIASYSDNKIRSKSRRVIATTLETVGYQTANGKYKSESYTGQLMAGYTYMMSENINLTPLAGLRYSTIKDKSYKETGTTYQNLTVKGKNYNTFDGLLGAKVSSNINVNEIVLTPELYAMVDYAFKNKVSAIDARLQGMTAPLPTNSFKQSKTSFDVGVGVTAKHKMMEYGINYDTNIGSKYFAQQGSVKVRVNF

SEQ ID NO: 1781 - protein, 359 aa, Escherichia coli
MTVLIHVLGSDIPHHNRTVLRFFNDALAATSEHAREFMVAGKDDGLSDSCLALSVQFFPGKKSLAEAVIAKAKANRQQRFFFHGQFNPKLWLALLSGGIKPSQFFWHIWGADLYELSSGLRYKLFYPLRRLAQKRVGCVFATRGDLSFFAKTHPKVRGELLYFPTRMDPSLNTMANDRQREGKMTILVGNSGDRSNEHIAALRAVHQQFGDTVKVVVPMGYPPNNEAYIEEVRQAGLELFSEENLQVLSEKLEFDAYLTLLRQCDLGYFIFARQQGIGTLCLLIQAGIPCVLNRENPFWQDMTEQHLPVLFTTDDLNEDIVREAQRQLASVDKNTIAFFSPNYLQGWQRALAIAAGEVA

SEQ ID NO: 1782 - protein, 149 aa, Mycobacterium intracellulare
MLMRSDPFRELDRFAHQVLGTAARPAVMPMDAWRQGEEFVVEFDLPGIDADSLDIDIERNVVTVRAERPALDPNREMLATERPRGVFSRQLVLGENLDTDKIQASYSEGVLSLHIPVAEKAKPRKIAVGRGDGHHAVAEGAAQREVINA

SEQ ID NO: 1783 - protein, 450 aa, Escherichia coli
MSLLQFSGLFVVWLLCTLFIATLTWFEFRRVRFNFNVFFSLLFLLTFFFGFPLTSVLVFRFDVGVAPPEILLQALLSAGCFYAVYYVTYKTRLRKRVADAPRRPLFTMNRVETNLTWVILMGIALVSVGIFFMHNGFLLFRLNSYSQIFSSEVSGVALKRFFYFFIPAMLVVYFLRQDSKAWLFFLVSTVAFGLLTYMIVGGTRANIIIAFAIFLFIGIIRGWISLWMLAAAGVLGIVGMFWLALKRYGMNVSGDEAFYTFLYLTRDTFSPWENLALLLQNYDNIDFQGLAPIVRDFYVFIPSWLWPGRPSMVLNSANYFTWEVLNNHSGLAISPTLIGSLVVMGGALFIPLGAIVVGLIIKWFDWLYELGNRETNRYKAAILHSFCFGAIFNMIVLAREGLDSFVSRVVFFIVVFGACLMIAKLLYWLFESAGLIHKRTKSSLWTQVEG

SEQ ID NO: 1784 - protein, 545 aa, Shigella dysenteriae
MLPINNNFSLPQNSFYNTISGTYADYFSAWDKWEKQALPGEERDEAVSRLKECLINNSDELRLDRLNLSSLPDNLPAQITLLNVSYNQLTNLPELPVTLKKLYSASNKLSELPVLPPALESLQVQHNELENLPALPDSLLTMNISYNEIVSLPSLPQALKNLRATRNFLTELPAFSEGNNPVVREYFFDRNQISHIPESILNLRNECSIHISDNPLSSHALQALQRLTSSPDYHGPRIYFSMSDGQQNTLHRPLADAVTAWFPENKQSDVSQTWHAFEHEEHANTFSAFLDRLSDTVSARNTSGFREQVAAWLEKLSASAELRQQSFAVAADATESCEDRVALTWNNLRKTLLVHQASEGLFDNDTGALLSLGREMFRLEILEDIARDKVRTLHFVDEIEVYLAFQTMLAEKLQLSTAVKEMRFYGVSGVTANDLRTAEAMVRSREENEFTDWFSLWGPWHAVLKRTEADRWALAEEQKYEMLENEYPQRVADRLKASGLSGDADAEREAGAQVMRETEQQIYRQLTDEVLALRLSENGSQLHHS

SEQ ID NO: 1785 - protein, 236 aa, Mycobacterium bovis; identical to SEQ ID NO: 1482

SEQ ID NO: 1786 - protein, 199 aa, Streptococcus pyogenes
MFRLLKRACSFLLLFVIYQSFVIHHNVQRVLAYKPMVEKTLAENDTKANVDLVLAMIYTETKGGEADVMQSSESSSGQKNSITDSQASIEHGVNLLSHNLALAEEAGVDSWTAVQAYNFGTAYIDYIAEHGGQNTVDLATTYSKTVVAPSLGNTSGQTYFYYHPLALISGGKLYKNGGNIYYSREVHFNLYLIELMSLF

SEQ ID NO: 1787 - protein, 310 aa, Streptococcus gordonii
MKKCRFLVLLLLAFVGLAACSSQKSSTDSSSSKLNVVATNSIIADITKNIAGDKINLHSIVPVGQDPHKYEPLPEDVKKTSKADLIFYNGINLETGGNAWFTKLVENAQKKENKDYYAVSEGVDVIYLEGQNEKGKEDPHAWLNLENGIIYAQNIAKRLIEKDPDNKATYEKNLKAYIEKLTALDKEAKEKFNNIPEEKKMIVTSEGCPKYFSKAYNVPSAYIWEINTEEEGTPDQIKSLVEKLRKTKVPSLFVESSVDDRPMKTVSKDTNIPIYAKIFTDSIAEKGEDGDSYYSMMKYNLDKISEGLAK

SEQ ID NO: 1788 - protein, 293 aa, Escherichia coli; identical to SEQ ID NO: 1580

SEQ ID NO: 1789 - protein, 174 aa, Mycoplasma hyorhinis
MKKSIFSKKLLFSFGSLVALAAIPLITISCGQTNTDQSQQPGSGSGSGSGTSNGSGSTPTPEQGNNQGGSTPTPEQGNNQGGSTPTPEQGNNQGGSTPTPEQGNNQGGSTPTPEQGNNQGGSTPTPEQGNNQGGSTPTPEQGNNQGGSTPTPEQGNNQGGSTPTPEQGNSQVSK

SEQ ID NO: 1790 - protein, 552 aa, Staphylococcus aureus; identical to SEQ ID NO: 1774

SEQ ID NO: 1791 - protein, 247 aa, Cronobacter sakazakii
MMSEQVTAPVYTLRGLPLLGWRDMQHALDYLYADGSLRHGTLVAINAEKMLALEADAEVRSLIEAAEFKYADGISVVRSVRKKYPQAKVSRVAGADLWEALMARAGREGTPVFLVGGKPQVLAQTIEKLKRQWNVNIVDAQDGYFKPEERAALFARIRDSGAQIVTVAMGSPRQEIFMRDCRLVHPDALYMGVGGTYDVFTGHVKRAPKAWQNLGLEWLYRLLSQPSRLKRQLRLLRYLGWHYTGRL

SEQ ID NO: 1792 - protein, 591 aa, Mycobacterium tuberculosis
MTAEPEVRTLREVVLDQLGTAESRAYKMWLPPLTNPVPLNELIARDRRQPLRFALGIMDEPRRHLQDVWGVDVSGAGGNIGIGGAPQTGKSTLLQTMVMSAAATHSPRNVQFYCIDLGGGGLIYLENLPHVGGVANRSEPDKVNRVVAEMQAVMRQRETTFKEHRVGSIGMYRQLRDDPSQPVASDPYGDVFLIIDGWPGFVGEFPDLEGQVQDLAAQGLAFGVHVIISTPRWTELKSRVRDYLGTKIEFRLGDVNETQIDRITREIPANRPGRAVSMEKHHLMIGVPRFDGVHSADNLVEAITAGVTQIASQHTEQAPPVRVLPERIHLHELDPNPPGPESDYRTRWEIPIGLRETDLTPAHCHMHTNPHLLIFGAAKSGKTTIAHAIARAICARNSPQQVRFMLADYRSGLLDAVPDTHLLGAGAINRNSASLDEAVQALAVNLKKRLPPTDLTTAQLRSRSWWSGFDVVLLVDDWHMIVGAAGGMPPMAPLAPLLPAAADIGLHIIVTCQMSQAYKATMDKFVGAAFGSGAPTMFLSGEKQEFPSSEFKVKRRPPGQAFLVSPDGKEVIQAPYIEPPEEVFAAPPSAG

SEQ ID NO: 1793 - protein, 388 aa, Bacillus weihenstephanensis
MIKNPKVLILTAHYGNGHVQVAKTLEQTFRQKGIEDVIVCDLFGESHPVITDITKYLYLKSYTVGKELYRLFYYGVEKIYDKKIASWYANFGRKRLKTLLQVEKPDIVINTFPIIAVPELKKQIGISIPVYNVLTDFCVHKIWIHREVDRYFVATDHVKKVMVDIGVPAEQIVETGIPIRSSFELKINPAIIYNKYQLCKDKKMLLIVAGAHGVLGSVKELCQSFMSVPNLQVVVVCGKNEALKQDLMELQEQGSDALKVFGYVENIDELFRVTSCMITKPGGITLSEAAALQVPVILYKPVPGQENENALYFEKKGAAVVIRDDSEVFAKTEALLQDDMKLLQMKEAMKSIYRPEPAGHIVDTILAENHAEPNHIPIKSPVLAESFT

SEQ ID NO: 1794 - protein, 382 aa, Mycobacterium tuberculosis
MDFGALPPEVNSARMYGGAGAADLLAAAAAWNGIAVEVSTAASSVGSVITRLSTEHWMGPASLSMAAAVQPYLVWLTCTAESSALAAAQAMASAAAFETAFALTVPPAEVVANRALLAELTATNILGQNVSAIAATEARYGEMWAQDASAMYGYAAASAVAARLNPLTRPSHITNPAGLAHQAAAVGQAGASAFARQVGLSHLISDVADAVLSFASPVMSAADTGLEAVRQFLNLDVPLFVESAFHGLGGVADFATAAIGNMTLLADAMGTVGGAAPGGGAAAAVAHAVAPAGVGGTALTADLGNASVVGRLSVPASWSTAAPATAAGAALDGTGWAVPEEDGPIAVMPPAPGMVVAANSVGADSGPRYGVKPIVMPKHGLF

SEQ ID NO: 1795 - protein, 371 aa, Caulobacter vibrioides
MSDLPRISVAAPRLDGNERDYVLECMDTTWISSVGRFIVEFEKAFADYCGVKHAIACNNGTTALHLALVAMGIGPGDEVIVPSLTYIASANSVTYCGATPVLVDNDPRTFNLDAAKLEALITPRTKAIMPVHLYGQICDMDPILEVARRHNLLVIEDAAEAVGATYRGKKSGSLGDCATFSFFGNKIITTGEGGMITTNDDDLAAKMRLLRGQGMDPNRRYWFPIVGFNYRMTNIQAAIGLAQLERVDEHLAARERVVGWYEQKLARLGNRVTKPHVALTGRHVFWMYTVRLGEGLSTTRDQVIKDLDALGIESRPVFHPMHIMPPYAHLATDDLKIAEACGVDGLNLPTHAGLTEADIDRVIAALDQVLV

SEQ ID NO: 1796 - protein, 212 aa, Borreliella burgdorferi
MKKNTLSAILMTLFLFISCNNSGKGGDSASTNPADESAKGPNLTEISKKITDSNAFVLAVKEVETLVLSIDELAKKAIGQKIDNNNGLAALNNQNGSLLAGAYAISTLITEKLSKLKNLEELKTEIAKAKKCSEEFTNKLKSGHADLGKQDATDDHAKAAILKTHATTDKGAKEFKDLFESVEGLLKAAQVALTNSVKELTSPVVAESPKKP

SEQ ID NO: 1797 - protein, 359 aa, Escherichia coli
MTVLIHVLGSDIPHHNRTVLRFFNDALAATSEHAREFMVVGKDDGLSDSCPALSVQFFPGKKSLAEAVIAKAKANRQQRFFFHGQFNPTLWLALLSGGIKPSQFFWHIWGADLYELSSGLRYKLFYPLRRLAQKRVGCVFATRGDLSFFAKTHPKVRGELLFFPTRMDPSLNTMANDRQREGKMTILVGNSGDRSNEHIAALRAVHQQFGDTVKVVVPMGYPPNNEAYIEEVRQAGLELFSEENLQILSEKLEFDAYLALLRQCDLGYFIFARQQGIGTLCLLIQAGIPCVLNRENPFWQDMTEQHLPVLFTTDDLNEDIVREAQRQLASVDKNTIAFFSPNYLQGWQRALAIAAREVA

SEQ ID NO: 1798 - protein, 138 aa, Mycobacterium avium
MVLMRTDPFRDLDRWTQQVLGTRRPAVMPMDAWRDGDQFVVEFDLPGVNADSLDLDVERNVLTVRAERPDLDQNREMVSAERPRGVFSRQLFLGDNLDTDKIEANYHDGVLRLTIPVAEKAKPRRIEINHNHRTAINA

SEQ ID NO: 1799 - protein, 457 aa, Erwinia tasmaniensis
MTLLQFAGLLLVWLVCGGFILTLTWREFRRVRFNFNVFFSMLFLLTFFFGFPLTCILVFGFDVEVVPAEYLLQALLSAGCFYAIYYVTYKTRLRTRHRAPSRPAFTINRIEAHLSWMIMALVALITVSVFFLHNGFLLFKLQKYSQIFSADVSGVALKRFFYFFIPAMLVVYFLQQNMRSWLLFLVGTVAFGLLTYAIVGGTRANIIIAFALFLFIGIIRGWITLWMLALAGVGAIVAMFWLALKRYNLDVSGSQAFYTFLYLTRDTFSPWENLGLLLQNYDRIDFQGLAPVWRDFYVFIPSWLWHERPSVVLNSANYFTWEVLDNHSGLAISPTLIGSLVVMGGALFIMLGAVMVGLIIKWFDWLYEKGRQEENPYKAAILQSFCFGAVFNMIVLAREGLDAFVSRVVFFCVIFAACVLVAKLLYWLLDSAGLVRARKGPACARSSLKHCFVGNDS

SEQ ID NO: 1800 - protein, 580 aa, Shigella dysenteriae
MHNVNTTTTGLSLAKILASTELGDNTIQAGNDAANKLFSLTIADLTANKNINTTNAHSTSNILIPELKAPKSLNASSQLTLLIGNLIQILGEKSLTALTNKITAWKSQQQARQQKNLEFSDKINTLLSETEGLTRDYEKQINKLKNADSKIKDLENKINQIQTRLSELDPDSPEKKKLSREEIQLTIKKDAAVKDRTLIEQKTLSIHSKLTDKSMQLEKEIDSFSAFSNTASAEQLSTQQKSLTGLASVTQLMATFIQLVGKNNEESLKNDLALFQSLQESRKTEMERKSDEYAAEVRKAEELNRVMGCVGKILGALLTIVSVVAAAFSGGASLALADVGLALMVTDAIVQAATGNSFMEQALNPIMKAVIEPLIKLLSDAFTKMLEGLGVDSKKAKMIGSILGAIAGALVLVAAVVLVATVGKQAAAKLAENIGKIIGKTLTDLIPKFLKNFSSQLDDLITNAVARLNKFLGAAGDEVISKQIISTHLNQAVLLGESVNSATQAGGSVASAVFQNSASTNLADLTLSKYQVEQLSKYISEAIEKFGQLQEVIADLLASMSNSQANRTDVAKAILQQTTA

SEQ ID NO: 1801 - protein, 236 aa, Mycobacterium tuberculosis; identical to SEQ ID NO: 1482

SEQ ID NO: 1802 - protein, 199 aa, Streptococcus pyogenes
MFRLLKRACSFLLLFVIYQSFVIHHNVQRVLAYKPMVEKTLAENDTKANVDLVLAMIYTETKGGEADVMQSSESSSGQKNSITDSQASIEHGVNLLSHNLALAEEAGVDSWTAVQAYNFGTAYIDYIAKHGSQNTVDLATTYSKTVVAPSLGNTSGQTYFYYHPLALISGGKLYKNGGNIYYSREVHFNLYLIELMSLF

SEQ ID NO: 1803 - protein, 306 aa, Streptococcus mutans
MKKLSLLLLVCLSLLGLFACTSKKTADKKLTVVATNSIIADITKNIAGNKVVLHSIVPVGRDPHEYEPLPEDVKKTSQADVIFYNGINLENGGNAWFTKLVKNAHKKTDKDYFAVSDSVKTIYLENAKEKGKEDPHAWLDLKNGIIYAKNIMKRLSEKDPKNKSYYQKNFQAYSAKLEKLHKVAKEKISRIPTEKKMIVTSEGCFKYFSKAYDIPSAYIWEINTEEEGTPNQIKALVKKLRKSRVSALFVESSVDDRPMKTVSKDTGIPIAAKIFTDSVAKKGQAGDSYYAMMKWNIDKIANGLSQ

SEQ ID NO: 1804 - protein, 292 aa, Salmonella anatum
MKTRKGIILAGGSGTRLYPVTMAVSKQLLPIYDKPMIYYPLSTLMLAGIRDILIISTPQDTPRFQQLLGDGSQWGLNLQYKVQPSPDGLAQAFIIGEEFIGNDDCALVLGDNIFYGHDLPKLMEAAVNKESGATVFAYHVNDPERYGVVEFDQSGTAVSLEEKPLQPKSNYAVTGLYFYDNSVVEMAKNLKPSARGELEITDINRIYMEQGRLSVAMMGRGYAWLDTGTHQSLIEASNFIATIEERQGLKVSCPEEIAYRKGFIDAEQIKNLAKPLSKNAYGQYLLNMIKGY

SEQ ID NO: 1805 - protein, 169 aa, Escherichia coli
MFLHSQDFATIVRSTPLISIDLIVENEFGEILLGKRINRPAQGYWFVPGGRVLKDEKLQTAFERLTEIELGIRLPLSVGKFYGIWQHFYEDNSMGGDFSTHYIVIAFLLKLQPNILKLPKSQHNAYCWLSRAKLINDDDVHYNCRAYFNNKTNDAIGLDNKDIICLMRQ

SEQ ID NO: 1806 - protein, 341 aa, Mycoplasma genitalium
MDKLVSILVPCYKSKPFLKRFFNSLLKQDLNQAKIIFFNDNVADETYEVLQKFKKEHNNLAIEVYCDKQNEGIGKVRDKLVNLVTTPYFYFIDPDDCFNNKNVIKEIVESIKKEDFDLGVLKSMVYLCFLKHDFIIKFLPLKGIFQGRVKLINNNNVNKLNYIKNNDQYIWNIVINTDFFRKLNLTFESRLFEDIPIWYPMFFSSQKIVFIDVIGTNYFIRNDSLSTTISAPRYLNLIQCYEKLYVNLSQNGSLASFIDPNHKIEARFWRRQMFVWFALFSFEYFKKNFSESKKILEKLFVFLEKNGVYERVFQTKNQGIYYIWVQRLKYFKHVLESKSDN

SEQ ID NO: 1807 - protein, 246 aa, Escherichia coli
MNNNTTAPTYTLRGLQLIGWRDMQHALDYLFADGQLKQGTLVAINAEKILTIEDNAEVRELINAAEFKYADGISVVRSVRKKYPQAQVSRVAGADLWEELMARAGKEGTPVFLVGGKPEVLAQTEAKLRNQWNVNIVGSQDGYFKPEQRQALFERIHASGAQIVTVAMGSPKQEIFMRDCRLVHPDALYMGVGGTYDVFTGHVKRAPKIWQTLGLEWLYRLLSQPSRIKRQLRLLRYLRWHYTGNL

SEQ ID NO: 1808 - protein, 511 aa, Mycobacterium tuberculosis
MSAPAVAAGPTAAGATAARPATTRVTILTGRRMTDLVLPAAVPMETYIDDTVAVLSEVLEDTPADVLGGFDFTAQGVWAFARPGSPPLKLDQSLDDAGVVDGSLLTLVSVSRTERYRPLVEDVIDAIAVLDESPEFDRTALNRFVGAAIPLLTAPVIGMAMRAWWETGRSLWWPLAIGILGIAVLVGSFVANRFYQSGHLAECLLVTTYLLIATAAALAVPLPRGVNSLGAPQVAGAATAVLFLTLMTRGGPRKRHELASFAVITAIAVIAAAAAFGYGYQDWVPAGGIAFGLFIVTNAAKLTVAVARIALPPIPVPGETVDNEELLDPVATPEATSEETPTWQAIIASVPASAVRLTERSKLAKQLLIGYVTSGTLILAAGAIAVVVRGHFFVHSLVVAGLITTVCGFRSRLYAERWCAWALLAATVAIPTGLTAKLIIWYPHYAWLLLSVYLTVALVALVVVGSMAHVRRVSPVVKRTLELIDGAMIAAIIPMLLWITGVYDTVRNIRF

SEQ ID NO: 1809 - protein, 391 aa, Staphylococcus aureus
MVTQNKKILIITGSFGNGHMQVTQSIVNQLNDMNLDHLSVIEHDLFMEAHPILTSICKKWYINSFKYFRNMYKGFYYSRPDKLDKCFYKYYGLNKLINLLIKEKPDLILLTFPTPVMSVLTEQFNINIPVATVMTDYRLHKNWITPYSTRYYVATKETKKDFIDVGIDPSTVKVTGIPIDNKFETPINQKQWLIDNNLDPDKQTILMSAGAFGVSKGFDTMITDILAKSANAQVVMICGKSKELKRSLTAKFKSNENVLILGYTKHMNEWMASSQLMITKPGGITITEGFARCIPMIFLNPAPGQELENALYFEEKGFGKIADTPEEAIKIVASLTNGNEQLTNMISTMEQDKIKYATQTICRDLLDLIGHSSQPQEIYGKVPLYARFFVK

SEQ ID NO: 1810 - protein, 552 aa, Staphylococcus aureus
MKGCLATMDKELWIKRANDSLVKHFYEQQSDIEQREGFESKLTFGTAGIRGKFGLGEGRLNKFTIEKLALGLARYLNAQTNNPTIVIHYDIRHLSTEFAQIIANVLANHQIIVYLPDTYKTTPELSFAVRNLNTTAGIMITASHNPKDYNGIKVYSSDGAQLSTDASELVSRYIEEVGDPLQIDIPISKQNTSYIKPFPKSVTDDYMKHIQNMIGYIPKSDLQVVFTSLHGTSVPIVPELLKSLNFNQFNLVEAQCKPDPNFSSVQSANPEDHRAFDQAVELANKSHADLLISTDPDADRLGIAERDAHGHITYFNGNQIGALLLNYRIQQTSQLRHRLMIQSIVSSELTKSLARYNNVEYKEVLTGFKFIAQEIRQLDDHQNMIFAFEESYGFLSEPFVRDKDAVQIVPLIIKYASELKLYGKTLKDELEQIYQTVGRHEDTLFSHTLEGLEGKKKIESIMTHFRSNPPQEIQGLKVKAIEDYLTSEVYQLDKDTTSQIDSPKSNVIRVLFDEGFIALRPSGTEPKIKLYVSLKCPDFDDVAQKINAMIFS

SEQ ID NO: 1811 - protein, 625 aa, Streptomyces avermitilis
MAHGCSGGAMSRFVFLGVALALLGGATSPAAAAPRVTPVVVDVDDYGADPTGRTDSTPAVAAALRHAKSVDRPVRIVFSKGTYQLYPERAETRELYMSNTVGADQRYRDKKIGLLVEDMHDVTVDGGGAKLVHHGLQTAFASIRSTDVTFQNFSFDYAAPEVIDATVATTGVTDGHAYRVLKIPAGSPYRVNGTHITWLGETSPATGQPYWSGVDGLQYTQIHDPEAQRTWRGDNPLFNDVAAVTDLGGRRIRIDYTTAARPADAGLVYQMRLIERTEPGAFIWESKNVTMRSMNAYYLQSFGVVGQFSENISIDKVNFAPDPRSGRSTASFADFVQMSGVKGKVSITRSLFDGPHDDPINIHGTYLEVVGKPGPSTLTLAYKHPQTAGFPQFAPGDEVEFATKRTMTPLADAHAQVTAVDGPSGMDHTKPLTTMTVTFDRPVPAGVETGGTVVENITATPSVVISGNVFRNVPTRGILVTTRKPVLITGNRFDGMSMASIYVSADAYQWYESGPVADLTIRGNSFTRPSGPVIFVEPTNQVIDPATPVHHNISVEHNSFDIGDVTVVNAKSVGGFAFTGNTVRRLDGADHPPYTSPLFVFHGSSGIRIARNHYDKGLNTSVVTD

SEQ ID NO: 1812 - protein, 93 aa, Mycobacterium tuberculosis
MNVTVSIPTILRPHTGGQKSVSASGDTLGAVISDLEANYSGISERLMDPSSPGKLHRFVNIYVNDEDVRFSGGLATAIADGDSVTILPAVAGG

SEQ ID NO: 1813 - protein, 246 aa, Escherichia coli; identical to SEQ ID NO: 1447

SEQ ID NO: 1814 - protein, 140 aa, Mycobacterium intracellulare
MLVRSDPFRDLDRFTQQLSGTAARPAAMPMDAWRDGEQFVVEFDLPGIDEQSLDLDIERNVVTVRAERPDVDPSREMLATERARGVFSRQLVLGDNLDTEHIDACYDAGVLRLRIPVAEKAKPRKIAVNRGDRQQTAISA

SEQ ID NO: 1815 - protein, 459 aa, Photorhabdus luminescens
MTLTQFGGLFVVYLISLVFILTLTYQEFRRVRFNFNIFFSLLYLLTFYFGFPLTCLLVFQFDVEVVPVDALLHALLASTCFYGIYYVSYKTRLRKPSMQPKAPVFTMNRVETNFTWLLLASVAVVTVGLFFMQNGFLLFKLQSYSQIFSSQVSGVALKRFFYFFIPAMLVVYFLKPTQLRWLFFLISTVAFGILTYVVVGGTRANIIIAFALFLFIGIVRGWITLWMLVTAGAIGIVGMFWLALKRYSLDVSGAEAFYTFLYLTRDTFSPWENFALLLNNYDKIDFQGLAPIIRDFYVFIPSWLWPGRPDAVLNSANYFTWEVLDNHSGLAISPTLIGSLVVMGGVLFIPVGAIVVGLIIKWFDWIYELGKQETNRYKAAILQAFCFGAIFNMIVLAREGVDSFVSRVVFFCIIFGLCLVIAKLLYWLFESAGLIRMYLTGNRVVSQKCPLQCEERKWS

SEQ ID NO: 1816 - protein, 233 aa, Staphylococcus aureus; identical to SEQ ID NO: 1465

SEQ ID NO: 1817 - protein, 140 aa, Mycobacterium tuberculosis
MCNRLVTVTGVAMVVAAGLSACGQAQTVPRKAARLTIDGVTHTTRPATCSQEHSYRTIDIRNHDSTVQAVVLLSGDRVIPQWVKIRNVDGFNGSFWHGGVGNARADRARNTYTVAGSAYGISSKKPNTVVSTDFNILAEC

SEQ ID NO: 1818 - protein, 199 aa, Streptococcus pyogenes
MFRLLKRACSFLLFFVIYQSFVIHHNVQRVLAYKPMVEKTLAENDTKANVDLVLAMIYTETKGGEADVMQSSESSSGQKNSITDSQASIEHGVNLLSHNLALAEEAGVDSWTAVQAYNFGTAYIDYIAKHGGQNTVDLATTYSKTVVAPSLGNTSGQTYFYYHPLALISGGKLYKNGGNIYYSREVHFNLYLIELMSLF

SEQ ID NO: 1819 - protein, 313 aa, Lactococcus lactis
MIEKYKNILITFIALAAIVFLVGCSNKKTDQVTDKKINVVVTNSILADITKNIADDKINLHSIVPVGKDPHEYEPLPVDVQKTSKADLIFYNGLNLETGGNAWFTKLVNNANKKENIDYFPVSTGVEVIYLEGKNTEGKEDPHAWLNLENGIIYAKNIEQQLSKKDPVNKDFYKHNLDKYVKKLSDLDQQAKSKFSLIPENEKMIVTSEGCFKYFSKAYNIPSAYIWEINTEEEGTPDQIKNLVRKLRATELKSLFVESSVDNRPMKTVSKDTGIPIYSTIFTDSVAKKGENGDSYYSMMKWNLDQIYKGLAK

SEQ ID NO: 1820 - protein, 292 aa, Salmonella typhimurium
MKTRKGIILAGGSGTRLYPVTMAVSKQLLPIYDKPMIYYPLSTLMLAGIRDILIISTPQDTPRFQQLLGDGSQWGLNLQYKVQPSPDGLAQAFIIGEEFIGHDDCALVLGDNIFYGHDLPKLMEAAVNKESGATVFAYHVNDPERYGVVEFDQKGTAVSLEEKPLQPKSNYAVTGLYFYDNSVVEMAKNLKPSARGELEITDINRIYMEQGRLSVAMMGRGYAWLDTGTHQSLIEASNFIATIEERQGLKVSCPEEIAFRKNFINAQQVIELAGPLSKNDYGKYLLKMVKGL

SEQ ID NO: 1821 - protein, 338 aa, Escherichia coli; identical to SEQ ID NO: 1621

SEQ ID NO: 1822 - protein, 525 aa, Mycobacterium tuberculosis
MSFVIAAPEFLTAAAMDLASIGSTVSAASAAASAPTVAILAAGADEVSIAVAALFGMHGQAYQALSVQASAFHQQFVQALTAGAYSYASAEAAAVTPLQQLVDVINAPFRSALGRPLIGNGANGKPGTGQDGGAGGLLYGSGGNGGSGLAGSGQKGGNGGAAGLFGNGGAGGAGASNQAGNGGAGGNGGAGGLIWGTAGTGGNGGFTTFLDAAGGAGGAGGAGGLFGAGGAGGVGGAALGGGAQAAGGNGGAGGVGGLFGAGGAGGAGGFSDTGGTGGAGGAGGLFGPGGGSGGVGGFGDTGGTGGDGGSGGLFGVGGAGGHGGFGSAAGGDGGAGGAGGTVFGSGGAGGAGGVATVAGHGGHGGNAGLLYGTGGAGGAGGFGGFGGDGGDGGIGGLVGSGGAGGSGGTGTLSGGRGGAGGNAGTFYGSGGAGGAGGESDNGDGGNGGVGGKAGLVGEGGNGGDGGATIAGKGGSGGNGGNAWLTGQGGNGGNAAFGKAGTGSVGVGGAGGLLEGQNGENGLLPS

SEQ ID NO: 1823 - protein, 359 aa, Escherichia coli
MTVLIHVLGSDIPHHNRTVLRFFNDALAATSEHAREFMVVGKDDGLSDSCPALSVQFFPGKKSLAEAVIAKAKANRQQRFFFHGQFNPTLWLALLSGGIKPSQFFWHIWGADLYELSSGLRYKLFYPLRRLAQKRVGCVFATRGDLSFFVKTHPKVRGELLYFPTRMDPSLNTMANDRQREGKMTILVGNSGDRSNEHVAALRAVHQQFGDTVKVVVPMGYPPNNEAYIEEVRQAGLELFSEENLQVLSEKLEFDAYLALLRQCDLGYFIFARQQGIGTLCLLIQAGIPCVLNRENPFWQDMTEQHLPVLFTTDDLNEDIVREAQRQLASVDKNTIAFFSPNYLQGWQRALAIAAGEVA

SEQ ID NO: 1824 - protein, 480 aa, Mycobacterium tuberculosis
MGLRLTTKVQVSGWRFLLRRLEHAIVRRDTRMFDDPLQFYSRSIALGIVVAVLILAGAALLAYFKPQGKLGGTSLFTDRATNQLYVLLSGQLHPVYNLTSARLVLGNPANPATVKSSELSKLPMGQTVGIPGAPYATPVSAGSTSIWTLCDTVARADSTSPVVQTAVIAMPLEIDASIDPLQSHEAVLVSYQGETWIVTTKGRHAIDLTDRALTSSMGIPVTARPTPISEGMFNALPDMGPWQLPPIPAAGAPNSLGLPDDLVIGSVFQIHTDKGPQYYVVLPDGIAQVNATTAAALRATQAHGLVAPPAMVPSLVVRIAERVYPSPLPDEPLKIVSRPQDPALCWSWQRSAGDQSPQSTVLSGRHLPISPSAMNMGIKQIHGTATVYLDGGKFVALQSPDPRYTESMYYIDPQGVRYGVPNAETAKSLGLSSPQNAPWEIVRLLVDGPVLSKDAALLEHDTLPADPSPRKVPAGASGAP

SEQ ID NO: 1825 - protein, 391 aa, Staphylococcus aureus
MVTQNKKILIITGSFGNGHMQVTQSIVNQLNDMNLDHLSVIEHDLFMEAHPILTSICKKWYINSFKYFRNMYKGFYYSRPDKLNKCFYKYYGLNKLINLLIKEKPDLILLTFPTPVMSVLTEQFNINIPVATVMTDYRLHKNWITPYSTRYYVATKETKQDFIDVGIDPSTVKVTGIPIDNKFETPINQKQWLIDNNLDPDKQTILMSAGAFGVSKGFDTMITDILAKSANAQVVMICGKSKELKRSLTAKFKSNENVLILGYTKHMNEWMASSQLMITKPGGITITEGFARCIPMIFLNPAPGQELENALYFEEKGFGKIADTPEEAIKIVASLTNGNEQLTNMISTMEQDKIKYATQTICQDLLDLIGHSSQPQEIYGKVPLYARFFVK

SEQ ID NO: 1826 - protein, 552 aa, Staphylococcus aureus
MKGCLATMDKELWIERANDSLVKHFYEQQSDIEQREGFESKLTFGTAGIRGKFGLGEGRLNKFTIEKLALGLARYLNAQTNSPTIVIHYDIRHLSTEFAQIIANVLANHQITVYLPDTYKTTPELSFAVRNLNTTAGIMITASHNPKDYNGIKVYGSDGAQLSTDASELASRYIEEVGDPLQIDIPISKQNTSYIKPFPKSVTDDYMKHIQNMIGYIPKSDLQVVFTSLHGTSVPIVPELLQSLNFNQFNLVEAQCKPDPNFSSVQSANPEDHRAFDQAVELANKSHADLLISTDPDADRLGIAERDAHGHITYFNGNQIGALLLNYRIQQTSQLRHRLMIQSIVSSELTKSLARYNNVEYKEVLTGFKFIAQEIRQLDDHQNMIFAFEESYGFLSEPFVRDKDAVQIVPLIIKYASELKLYGKTLKDELEQIYQTVGRHEDTLFSHTLDGLEGKKKIESIMTHFRSNPPQEIQGLKVKAIEDYLTSEVYHLDKDTTSQINSPKSNVIRVLFDEGFIALRPSGTEPKIKLYVSLKCRNFDDVAQKINAMIFS

SEQ ID NO: 1827 - protein, 373 aa, Vibrio cholerae
MNKKVALITGITGQDGSYLAEFLLEKGYEVHGIKRRSSLFNTQRVDHLYKDPHEEDVNFKLHYGDLTDSSNLTRILAEVQPDEVYNLGAQSHVAVSFQSPEYTADVDAIGTLRLLEAIRFLGLTKKTKFYQASTSELYGLVQEIPQKETTPFYPRSPYAVAKMYAYWITINYRESYGIYACNGILFNHESPRRGETFVTRKITRGMANIAQGLEKCLFMGNLDALRDWGHAKDYVKMQWMMLQQDEPRDFVIATGVQYSVREFIDMSARELGIELEFVGKGVDEKAVVKSVIGTKAPAIKVGDIIVAVDPAYFRPAEVETLLGDPSLAKKELGWVPEITLQQMVSEMVASDLEQAQSHALLKKHGYNVNVSVE

SEQ ID NO: 1828 - protein, 371 aa, Mycobacterium tuberculosis
MRVGIPTETKNNEFRVAITPAGVAELTRRGHEVLIQAGAGEGSAITDADFKAAGAQLVGTADQVWADADLLLKVKEPIAAEYGRLRHGQILFTFLHLAASRACTDALLDSGTTSIAYETVQTPDGALPLLAPMSEVAGRLAAQVGAYHLMRTQGGRGVLMGGVPGVEPADVVVIGAGTAGYNAARIANGMGATVTVLDINIDKLRQLDAEFCGRIHTRYSSAYELEGAVKRADLVIGAVLVPGAKAPKLVSNSLVAHMKPGAVLVDIAIDQGGCFEGSRPTTYDHPTFAVHDTLFYCVANMPASVPKTSTYALTNATMPYVLELADHGWRAACRSNPALAKGLSTHEGALLSERVATDLGVPFTEPASVLA

SEQ ID NO: 1829 - protein, 246 aa, Yersinia pestis; identical to SEQ ID NO: 1495

SEQ ID NO: 1830 - protein, 148 aa, Mycobacterium leprae
MLMRTDPFRELDRFAEQVLGTSARPAVMPMDAWREGEEFVVEFDLPGIKADSLDIDIERNVVTVRAERPGVDPDREMLAAERPRGVFNRQLVLGENLDTERILASYQEGVLKLSIPVAERAKPRKISVDRGNNGHQTINKTAHEIIDA

SEQ ID NO: 1831 - protein, 452 aa, Salmonella arizonae
MNLMQFSGLLVVWLLSTLFIATLTWFEFRRVRFNFNVFFSLLFLLTFFFGFPLTSVLVFRFDVGVAPPEILLQALLSAACFYGVYYVTYKTRLRKRVVDVTRKPLFTMNRVETHLTWVILMGIALVSVGIFFMHNGFLLFRLHSYSQIFSSEVSGVALKRFFYFFIPAMLVVYFLRQDSKAWLFFLVSTVAFGLLTYMIVGGTRANIIIAFAIFLFIGIIRGWISLWMLAAAGVLGIVGMFWLALKRYGLNVSGDEAFYTFLYLTRDTFSPWENLALLLQNYHNIDFQGLAPIVRDFYVFIPTWLWPGRPSIVLNSANYFTWEVLNNHSGLAISPTLIGSLVVMGGALFIPLGAIVVGLIIKWFDWLYELGNREPNRYKAAILHSFCFGAIFNMIVLAREGLDSFVSRVVFFLVVFGASLLVAKLLFWLFDSAGLIHKRTTSLPQAQVERKL

SEQ ID NO: 1832 - protein, 175 aa, Staphylococcus aureus; identical to SEQ ID NO: 1257

SEQ ID NO: 1833 - protein, 194 aa, Mycobacterium leprae
MSRWTHRTFFIALSAIVTTAGFGSSGCAHGNSSTSESAVPSTFPGISSSITAPPATGLPAPEVLTNVLSRLADPNIPGIDKLPLIESATPDSAVTLDKFSNALRDNGYLPMTFTANNIAWSNKNPSDVLATISVNIAQTNNSVFSFPMEFTPFPPPQQSWQLSKRTADMLLEFGNSSGLTNPAPIKAPTPTPSH

SEQ ID NO: 1834 - protein, 285 aa, Mycobacterium intracellulare
MRREQQLPAAVAAPVADGGQLMRAVDLTLGFGPKTVLEQVSLDFPARSVTTLLGPTGSGKTTFLRTLNRMNDKVSGFRHSGDVLLGGRTIFADRDLMEFRRSVGMLFQRPNPFPMSIMDNVVAGVRAHKMAPRKQFKTVAEARLTEVGLWDAVKDRLGDSPFRLSGGQQQLLCLARALAVNPDVLLLDEPTSSLDPTTTEKIEGLIRSLADRLTVIMVTHDLAQAARTGDRTAFFFEGRLVEEGPTKHLFLSPQHEETVRYFAPFRPAQGSDRGSSQTAGVAESQ

SEQ ID NO: 1835 - protein, 310 aa, Streptococcus pyogenes; identical to SEQ ID NO: 1627

SEQ ID NO: 1836 - protein, 295 aa, Xanthomonas campestris
MTQRKGIILAGGSGTRLYPITKGVSKQLLPVYDKPMIYYPLSVLMLAGIRDILIINTPHEQALFQSLLGDGAQWGVNIQYAVQPSPDGLAQAYLIGRDFVGGKPSCLVLGDNIFHGHGLTDTLRRADAREQGATVFGYWVNDPERYGVAEFDQHGKVIDIAEKPEKPRSNYAVTGLYFYDGKASDYAAALKPSPRGELEITDLNRCYLDAGDLHLEPLGRGYAWLDTGTHQSLHEAANFIETIQMRQGLQVCCPEEIAFGQGWIDAEQLERLAAPLLKNDYGKYLTALAKRGAVH

SEQ ID NO: 1837 - protein, 467 aa, Salmonella typhimurium
MPATKFSRRTLLTAGSALAVLPFLRALPVQAREPRETVDIKDYPADDGIASFKQAFADGQTVVVPPGWVCENINAAITIPAGKTLRVQGAVRGNGRGRFILQDGCQVVGEQGGSLHNVTLDVRGSDCVIKGVAMSGFGPVAQIFIGGKEPQVMRNLIIDDITVTHANYAILRQGFHNQMDGARITHSRFSDLQGDAIEWNVAIHDRDILISDHVIERINCTNGKINWGIGIGLAGSTYDNSYPEDQAVKNFVVANITGSDCRQLVHVENGKHFVIRNVKAKNITPGFSKNAGIDNATIAIYGCDNFVIDNIDMTNSAGMLIGYGVVKGKYLSIPQNFKLNAIRLDNRQVAYKLRGIQISSGNTPSFVAITNVRMTRATLELHNQPQHLFLRNINVMQTSAIGPALKMHFDLRKDVRGQFMARQDTLLSLANVHAINENGQSSVDIDRINHQTVNVEAVNFSLPKRGG

SEQ ID NO: 1838 - protein, 290 aa, Coxiella burnetii
MSMTQKRGLGRGLSDLGLNELLTEINDASLADSKTELKKLTIDVIQPGRYQPRRQMDKDALEELANSIRAQGIIQPIVVRPVGQRYEIIAGERRWRAAQLAGLKEVPAVIRPITDEAAITMSLIENIQRQNLNAIEEAAALQRLLDEFKMTHEEIAEAVGKSRTSVTNSLRLLKLNPDVKALLEQGHLDMGHARALLALEGFQQSEAANIIIKRALSVRETEKLIQHWQSEGKSSANRPSMDPDVARLQHHLSDKLGAAVTIRHGAKGKGKLIIHYNSADELEGILDRIR

SEQ ID NO: 1839 - protein, 246 aa, Escherichia coli; identical to SEQ ID NO: 1765

SEQ ID NO: 1840 - protein, 96 aa, Mycobacterium tuberculosis; identical to SEQ ID NO: 1280

SEQ ID NO: 1841 - protein, 391 aa, Staphylococcus saprophyticus
MVTQNKKILIITGSFGNGHLQVTQSVVNQFKEMNLDNLTVIEHDLFLEAHPILTSICKKWYINSFKYFRNMYKAFYYSQPDQLDKCFYKYYGLNKLMNLLLKEKPDLILLTFPTPVMSVLTEQFDMNIPIATVMTDYRMQKNWITPFSQRYYLATEELKDEFASIGIPKDKLKVTGIPISDKFETDIDKTAWLSQNHLDPDKPTILMSAGAFGVSKGFGQMIQEILNRSPHAQVVMICGKNKDLKRSLTSQFKDFNNVLILGYTKHMNEWMASSQLMITKPGGITISEALTRQIPMIFLDPAPGQELENAVYFEEKGYGRIANTPEAAIEQVAALTNAPTKLASMSESMDASRIPYSTYKLCKDLLNLLNHSSHYEEVYGKVPLYAKLFVK

SEQ ID NO: 1842 - protein, 552 aa, Staphylococcus aureus; identical to SEQ ID NO: 1826

SEQ ID NO: 1843 - protein, 289 aa, Staphylococcus saprophyticus
MRKIKKAIIPAAGLGTRFLPATKAMPKEMLPILDKPTIQYIVEEAARAGIEDIIIVTGKHKRAIEDHFDNQKELEMILQEKGKTDLLEKVKYSTELANIFYVRQKEQKGLGHAIYSARQFIGDEPFAVLLGDDIVESDNPAIKQLIEAYEETGKSVIGVQEVDEAQTHRYGIIDPLQKFGRKYEVNEFVEKPKQGTAPSNLAIMGRYVLTPDIFDYLATQGEGAGGEIQLTDAIERLNRADQVYAYDFEGDRYDVGEKLGFVKTTIEYALKDESMHDELVEFIKKLKLN

SEQ ID NO: 1844 - protein, 623 aa, Mycobacterium paratuberculosis
MARAVGIDLGTTNSVVAVLEGGDPVVVANSEGSRTTPSIVAFARNGEVLVGQPAKNQAVTNVDRTIRSVKRHMGTDWSIEIDGKKYTAQEISARVLMKLKRDAEAYLGEDITDAVITVPAYFNDAQRQATKEAGQIAGLNVLRIVNEPTAAALAYGLDKGEKEQTILVFDLGGGTFDVSLLEIGEGVVEVRATSGDNQLGGDDWDDRIVNWLVDKFKGTSGIDLTKDKMAMQRLREAAEKAKIELSSSQSTSINLPYITVDADKNPLFLDEQLTRAEFQRITQDLLDRTRQPFKSVIADAGISVSDIDHVVLVGGSTRMPAVTDLVKELTGGKEPNKGVNPDEVVAVGAALQAGVLKGEVKDVLLLDVTPLSLGIETKGGVMTKLIERNTTIPTKRSETFTTADDNQPSVQIQVYQGEREIAAHNKLLGSFELTGIPPAPRGVPQIEVTFDIDANGIVHVTAKDKGTGKENTIKIQEGSGLSKEEIDRMIKDAEAHAEEDRKRREEADVRNQAESLVYQTEKFVKDQREAEGGSKVPEETLSKVDAAIADAKTALGGTDITAIKSAMEKLGQESQALGQAIYEATQAESAQAGGPDGAAAGGGSGSADDVVDAEVVDDDRESK

SEQ ID NO: 1845 - protein, 359 aa, Salmonella agona
MTVLIHVLGSDIPHHNHTVLRFFNDTLAATSEHAREFMVAGEDNGFTESCPALSLRFYGSKKALAQAVIAKAKANRRQRFFFHGQFNTSLWLALLSGGIKPAQFYWHIWGADLYEVSHGLKFRLFYPLRRIAQGRVGGVFATRGDLSYFARQHPGVRGELLYFPTRMDPSLNAMAKERQRAGKLTILVGNSGDRSNQHIAALRAVYQQFGDTVNVVVPMGYPANNQAYIDEVRQAGLALFSAENLQILSEKMEFDTYLALLRQCDLGYFIFARQQGIGTLCLLIQADIPCVLNRDNPFWQDMAEQHLPVLFTTDDLNEQVVREAQRQLASVDKSGITFFSPNYLQPWHNALRIAAGEAE

SEQ ID NO: 1846 - protein, 337 aa, Mycobacterium ulcerans
MKLVDRFRGAATGTSRRLMVGAVGAALLSGLVGFVGGSATASAFSRPGLPVEYLQVPSVAMGRNIKVQFQSGGANSPALYLLDGMRAQDDFSGWDINTPAFEWYYQSGISVAMPVGGQSSFYSDWYNPACGKAGCTTYKWETFLTSELPQYLSANKGVKPTGSGVVGLSMAGSSALILAAYHPDQFVYSGSLSALLDPSQGIGPSLIGLAMGDAGGYKASDMWGPKDDPAWARNDPMLQVGKLVANNTRIWVYCGNGKPSDLGGDNLPAKFLEGFVRTSNMKFQAAYNAAGGHNAVWNFDDNGTHSWEYWGAQLNAMRPDLQHTLGATPNTGDTQGA

SEQ ID NO: 1847 - protein, 452 aa, Salmonella choleraesuis
MSVMQFSGLLVVWLLSTLFIATLTWFEFRRVRFNFNVFFSLLFLLTFFFGFPLTSVLVFRFDVGVAPPEILLQALLSAACFYGVYYVTYKTRLRKRVVDVPRKPLFTMNRVETHLTWVILMGIALVSVAIFFMHNGFLLFRLHSYSQIFSSEVSGVALKRFFYFFIPAMLVVYFLRQDSKAWLFFLVSTVAFGLLTYMIVGGTRANIIIAFAIFLFIGIIRGWISLWMLAAAGVLGIVGMFWLALKRYGLNVSGDEAFYTFLYLTRDTFSPWENLALLLQNYHNIEFQGLAPIVRDFYVFIPTWLWPGRPSIVLNSANYFTWEVLNNHSGLAISPTLIGSLVVMGGALFIPLGAIVVGLIIKWFDWLYELGNREPNRYKAAILHSFCFGAIFNMIVLAREGLDSFVSRVVFFLVVFGASLLVAKLLFWLFDSAGLIHKRTTSLPQAQVEGKL

SEQ ID NO: 1848 - protein, 434 aa, Escherichia coli
MSFNTIIDWNSCTAKQQRQLLMRPAISASESITRTVNDILDSVKARGDDALREYSAKFDKTTVTALKVSAEEIAAASERLSDELKQAMAVAVKNIETFHTAQKLPPVDVETQPGVRCQQVTRPVASVGLYIPGGSAPLFSTVLMLATPARIAGCKKVVLCSPPPIADEILYAAQLCGVQDVFNVGGAQAIAALAFGTESVPKVDKIFGPGNAFVTEAKRQVSQRLDGAAIDMPAGPSEVLVIADSGATPDFVASDLLSQAEHGPDSQVILLTPDADMAHQVAEAVERQLAELPRAETARQALNASRLIVTKDLAQCVEISNQYGPEHLIIQTRNARELVDGITSAGSVFLGDWSPESAGDYASGTNHVLPTYGYTATCSSLGLADFQKRMTVQELSKVGFSALASTIETLAAAERLTAHKNAVTLRVNALKEQA

SEQ ID NO: 1849 - protein, 159 aa, Mycobacterium tuberculosis; identical to SEQ ID NO: 1354

SEQ ID NO: 1850 - protein, 370 aa, Mycobacterium tuberculosis
MKLNRFGAAVGVLAAGALVLSACGNDDNVTGGGATTGQASAKVDCGGKKTLKASGSTAQANAMTRFVNVFEQACPGQTLNYTANGSGAGISEFNGNQTDFGGSDVPLSKDEAAAAQRRCGSPAWNLPVVFGPIAVTYNLNSVSSLNLDGPTLAKIFNGSITQWNNPAIQALNRDFTLPGERIHVVFRSDESGTTDNFQRYLQAASNGAWGKGAGKSFQGGVGEGARGNDGTSAAAKNTPGSITYNEWSFAQAQHLTMANIVTSAGGDPVAITIDSVGQTIAGATISGVGNDLVLDTDSFYRPKRPGSYPIVLATYEIVCSKYPDSQVGTAVKAFLQSTIGAGQSGLGDNGYIPIPDEFKSRLSTAVNAIA

SEQ ID NO: 1851 - protein, 309 aa, Streptococcus parasanguinis
MKKIASVLALFVALLFGLLACSKGSSSGASGKLKVVTTNSILADITKNIAGDKIELHSIVPVGKDPHEYEPLPEDVKKTSQADLIFYNGINLETGGNAWFTKLVKNANKVENKDYFAVSEGVDVIYLEGQNQAGKEDPHAWLNLENGILYAKNIAKQLIAKDPKNKDFYEKNLAAYTEKLSKLDQKAKQAFKNIPEDKKMIVTSEGCFKYFSKAYGVPSAYIWEINTEEEGTPEQIKTLVEKLRQTKVPALFVESSVDERPMKTVAKDTNIPIYAKIFTDSIAKEGEKGDSYYSMMKWNLDKIAEGLSQ

SEQ ID NO: 1852 - protein, 338 aa, Haemophilus influenzae
MMNILVTGGSGFIGSALIRYIINHTQDFVINIDKLTYAANQSALREVENNPRYVFEKVDICDLNVIENIFEKYQPDAVMHLAAESHVDRSISGAADFVQTNIVGTYTLLEVAKNYWHTLDEAKKTTFRFHHISTDEVYGDLSLSEPAFTEQSPYHPSSPYSASKAASNHLVQAWHRTYGLPVIITNSSNNYGAYQHAEKLIPLMISNAVMGKPLPIYGDGQQIRDWLFVEDHVQASYLVLTKGRVGENYNIGGNCEKTNLEVVKRICQLLEELAPSKPNHIKYYEDLMTFVKDRPGHDVRYSLDCSKIHAELGWQPQITFEQGLRQTVKWYLFNSSSS

SEQ ID NO: 1853 - protein, 234 aa, Escherichia coli
MVINIFYICTGEYKRFFDKFYLSCEDKFIPEFGKKYYVFTDSDRIYFSKYLNVEVINVEKNCWPLNTLLRFSYFLKVIDKLQTNSYTFFFNANAVIVKEIPFSTFMESDLIGVIHPGYKNRISILYPWERRKNATCYLGYLKKGIYYQGCFNGGKTASFKRLIQICNMMTMADLKKNLIAKVHDESYLNYYYYYNKPLLLSELYSWPEKYGENKDAKIIMRDKERESWYGNIKK

SEQ ID NO: 1854 - protein, 1310 aa, Streptococcus intermedius
MKKRKEVFGFRKSKVAKTLCGAVLGAALLAMVDQQVAAEETTKSNSTTNVAVTATGNPATNLPEAQGSASKEAEQSQNQAGETNGSIPVEVPKTDLDQAAKEAKSAGVNVVQDADVNKGTVKTAGEAAQKETEIKEDYTKQAEDIKKTTDQYKSDVAAHEAEVAKIKAKNQATKEQYEKDMAAHKAEVERINAANAASKAAYETKLAQYQAELKRVQEANATNEANYQAKLTAYKTELARVQKANADAKAAYEAAVAANNAANAALTAENTAIKKRNADAKADYEAKLAKYQADLAKYQKDLAEYPQKLKEYNEEQAKIKEALKKLEQDKNKDGHLTEPSAQSLVYDSEPDAKLSLTTEDGTLLKSSVVDEAFSKSTSKAKYDQKILQLDDLDIRGLEKADSATSTVELYGNIGNKSTWTTNVGNNTEVKWGSVLLKRGQSVTATYTNLQKTYYNGKKVSKIVYKYTVDKDSKFQNPSGNVWLGVFSDPTLGVFASAYTGQVEKDTSIFIKNEFTFYDENDQPINFDNALLSVASLNRENNSIEMAKDYTGKFVRISGSSIDEKDGKIYATKTLNFKKGQGGSRWTMYPNGQEGSGWDSSDAPNSWYGAGAVKISGQHNSITLGAISATLVVPSDSVMAVETGKKPNIWYSLNGKIRAVNVPKITKENPTPPVEPTAPQAPTYEVEKPLNPAPVAPNYEKEPTPPTPTPDQPEPNKPVEPTYEAIPTPPTDPVYQNLPTPPAVPTVHFRYYKLAVQPQVNKEIKNNNDVDIDKTLVAKQSVVKFQLKTADLPAGRAKTTSFVLVDPLPSGYQFNLEATKAASPGFDVSYDKATNTVTFKATAATLATFNADLTKSVATIYPTVVGQVLNDGATYKNNFTLTVNDAYGIKSNVVRVTTPGKPNDPDNPNNNYIKPTKVNKNENGVVIDGKTVLAGSTNYYELTWDLDQYKNDRSSADTIQKGFYYVDDYPEEALELRQDLVKITDANGNKVTGVSVDHYTSLEAAPQEVRDVLSKAGIRPKGAFQIFRADNPREFYDTYVKNGIDLKIVSPMVVKKQMGQTGGSYENQAYQIDFGNGYASNIVINNVPKINPKKDVTLTLDPADTNNVDGQTIPLNTVFNYRLIGGIIPADHSEELFEYNFYDDYDQTGDRYTGQYKVFAKVDITLKDGSVIKSGTDLTQHTTAEVDATKGALTIKFKEDFLRSVSIDSAFQAESYIQMKRIAAGTFENTYVNTVNKVAYASNTVRTTTPQAPRSEVPKRPTPVSYLTNKLSSAPATLPQTGTTDSSYMPYLGVIALLSVLGLGQLKRNEK

SEQ ID NO: 1855 - protein, 359 aa, Escherichia coli
MTVLIHVLGSDIPHHNRTVLRFFNDALAATSEHAREFMVVGKDDGLSDSCPALSVQFFPGKKSLAEAVIAKAKANRQQRFFFHGQFNPTLWLALLSGGIKPSQFFWHIWGADLYELSSGLRYKLFYPLRRLAQKRVGCVFATRGDLSFFAKTHPKVRGELLYFPTRMDPSLNTMANDRQREGKMTILVGNSGDRSNEHVAALRAVHQQFGDTVKVVVPMGYPPNNEAYIEEVRQAGLELFSEENLQVLSEKLEFDAYLALLRQCDLGYFIFARQQGIGTLCLLIQAGIPCVLNRENPFWQDMTEQHLPVLFTTDDLNEDIVREAQRQLASVDKNTIAFFSPNYLQGWQRALAIAAGEVA

SEQ ID NO: 1856 - protein, 94 aa, Mycobacterium tuberculosis; identical to SEQ ID NO: 1296

SEQ ID NO: 1857 - protein, 388 aa, Bacillus cereus
MIKNPKVLILTAHYGNGHVQVAKTLEQTFRQKGIEDVIVCDLFGESHPFITDITKYLYLKSYTIGKELYRLFYYGVEKIYDKKIASWYANFGRKRLKTLLQVEKPDIVINTFPIIAVPELKKQTGISIPVYNVLTDFCVHKIWIHREVDRYFVATDHVKELMVDIGVPAEQIVETGIPIRSSFELKVNPDIIYNKYQLCKNKKILLIVAGAHGVLGNVKELCQSFMSVPNLQVVVVCGKNEALKQDLLSLQNQNSDALKVFGYVENIDELFRVTSCMITKPGGITLSEAAALQVPVILYKPVPGQENENAMYFEKKGAAVVIRDDSEVFAKTEALLQDDVKLLQMKEAMKSIYLPEPAGHIVDAILAENHAEPRHIPIKSPALAQSFT

SEQ ID NO: 1858 - protein, 581 aa, Bacillus subtilis
MTWRKSYERWKQTEHLDLELKERLIELEGDEQALEDCFYKDLEFGTGGMRGEIGAGTNRMNIYTVRKASAGFAAYISKQGEEAKKRGVVIAYDSRHKSPEFAMEAAKTLATQGIQTYVFDELRPTPELSFAVRQLNAYGGIVVTASHNPPEYNGYKVYGDDGGQLPPKEADIVIEQVNAIENELTITVDEENKLKEKGLIKIIGEDIDKVYTEKLTSISVHPELSEEVDVKVVFTPLHGTANKPVRRGLEALGYKNVTVVKEQELPDSNFSTVTSPNPEEHAAFEYAIKLGEEQNADILIATDPDADRLGIAVKNDQGKYTVLTGNQTGALLLHYLLSEKKKQGILPDNGVVLKTIVTSEIGRAVASSFGLDTIDTLTGFKFIGEKIKEYEASGQYTFQFGYEESYGYLIGDFARDKDAIQAALLAVEVCAFYKKQGMSLYEALINLFNEYGFYREGLKSLTLKGKQGAEQIEAILASFRQNPPQKMAGKQVVTAEDYAVSKRTLLTESKEEAIDLPKSNVLKYFLEDGSWFCLRPSGTEPKVKFYFAVKGSSLEDSEKRLAVLSEDVMKTVDEIVESTAK

SEQ ID NO: 1859 - protein, 288 aa, Staphylococcus aureus; identical to SEQ ID NO: 1371

SEQ ID NO: 1860 - protein, 159 aa, Escherichia coli
MKKLAIMAAASMIFTVGSAQATFQASGTTGITTLTVTEECRVQVGNVTATLARSKLKDDTAIGVIGVTALGCNGLQAALQADPDNYDATNLYMTSRNHDKLNVKLKATDGSSWTYGNGVFYKTEGGNWGGHVGISVDGNQTDKPTGEYTLNLTGGYWTN

SEQ ID NO: 1861 - protein, 359 aa, Salmonella arizonae
MTVLIHVLGSDIPHHNHTVLRFFNDTLASTNEHAREFMVAGEDNGFTESCPALSLRFYGSKKALAQAVIAKAKANRRQRFFFHGQFNTSLWLALLSGGIKPAQFYWHIWGADLYEASSGLKFRFFYPIRRIAQGRVGGVFATRGDLSYFARQHPGVRGELLYFPTRMDPSLNSLAIECQRAGKLTILVGNSGDRSNEHITALRAVHQQFGDTVNVVVPMGYPANNQAYIDEVRQEGLALFSAENLQILSEKMEFDAYLALLRQCDLGYFIFARQQGIGTLCLLIQANIPCVLNRDNPFWQDMAEQHLPVLFTTDDLSERVVREAQRQLASVDKSGITFFSPNYLQPWHNALRIAAGEAE

SEQ ID NO: 1862 - protein, 325 aa, Mycobacterium bovis
MTDVSRKIRAWGRRLMIGTAAAVVLPGLVGLAGGAATAGAFSRPGLPVEYLQVPSPSMGRDIKVQFQSGGNNSPAVYLLDGLRAQDDYNGWDINTPAFEWYYQSGLSIVMPVGGQSSFYSDWYSPACGKAGCQTYKWETLLTSELPQWLSANRAVKPTGSAAIGLSMAGSSAMILAAYHPQQFIYAGSLSALLDPSQGMGPSLIGLAMGDAGGYKAADMWGPSSDPAWERNDPTQQIPKLVANNTRLWVYCGNGTPNELGGANIPAEFLENFVRSSNLKFQDAYNAAGGHNAVFNFPPNGTHSWEYWGAQLNAMKGDLQSSLGAG

SEQ ID NO: 1863 - protein, 452 aa, Salmonella heidelberg; identical to SEQ ID NO: 1279

SEQ ID NO: 1864 - protein, 94 aa, Pseudomonas aeruginosa
MTKSELIERIVTHQGQLSAKDVELAIKTMLEQMSQALATGDRIEIRGFGSFSLHYRAPRVGRNPKTGESVRLDGKFVPHFKPGKELRDRVNEPE

SEQ ID NO: 1865 - protein, 159 aa, Mycobacterium tuberculosis
MKRGLTVAVAGAAILVAGLSGCSSNKSTTGSGETTTAAGTTASPGAASGPKVVIDGKDQNVTGSVVCTTAAGNVNIAIGGAATGIAAVLTDGNPPEVKSVGLGNVNGVTLGYTSGTGQGNASATKDGSHYKITGTATGVDMANPMSPVNKSFEIEVTSS

SEQ ID NO: 1866 - protein, 797 aa, Haemophilus influenzae
MKKLLIASLLFGTTTTVFAAPFVAKDIRVDGVQGDLEQQIRASLPVRAGQRVTDNDVANIVRSLFVSGRFDDVKAHQEGDVLVVSVVAKSIISDVKIKGNSVIPTEALKQNLDANGFKVGDVLIREKLNEFAKSVKEHYASVGRYNATVEPIVNTLPNNRAEILIQINEDDKAKLASLTFKGNESVSSSTLQEQMELQPDSWWKLWGNKFEGAQFEKDLQSIRDYYLNNGYAKAQITKTDVQLNDEKTKVNVTIDVNEGLQYDLRSARIIGNLGGMSAELEPLLSALHLNDTFRRSDIADVENAIKAKLGERGYGSATVNSVPDFDDANKTLAITLVVDAGRRLTVRQLRFEGNTVSADSTLRQEMRQQEGTWYNSQLVELGKIRLDRTGFFETVENRIDPINGSNDEVDVVYKVKERNTGSINFGIGYGTESGISYQASVKQDNFLGTGAAVSIAGTKNDYGTSVNLGYTEPYFTKDGVSLGGNVFFENYDNSKSDTSSNYKRTTYGSNVTLGFPVNENNSYYVGLGHTYNKISNFALEYNRNLYIQSMKFKGNGIKTNDFDFSFGWNYNSLNRGYFPTKGVKASLGGRVTIPGSDNKYYKLSADVQGFYPLDRDHLWVVSAKASAGYANGFGNKRLPFYQTYTAGGIGSLRGFAYGSIGPNAIYAEYGNGSGTGTFKKISSDVIGGNAIATASAELIVPTPFVSDKSQNTVRTSLFVDAASVWNTKWKSDKNGLESDVLKRLPDYGKSSRIRASTGVGFQWQSPIGPLVFSYAKPIKKYENDDVEQFQFSIGGSF

SEQ ID NO: 1867 - protein, 299 aa, Mycobacterium bovis
MKGRSALLRALWIAALSFGLGGVAVAAEPTAKAAPYENLMVPSPSMGRDIPVAFLAGGPHAVYLLDAFNAGPDVSNWVTAGNAMNTLAGKGISVVAPAGGAYSMYTNWEQDGSKQWDTFLSAELPDWLAANRGLAPGGHAAVGAAQGGYGAMALAAFHPDRFGFAGSMSGFLYPSNTTTNGAIAAGMQQFGGVDTNGMWGAPQLGRWKWHDPWVHASLLAQNNTRVWVWSPTNPGASDPAAMIGQAAEAMGNSRMFYNQYRSVGGHNGHFDFPASGDNGWGSWAPQLGAMSGDIVGAIR

SEQ ID NO: 1868 - protein, 299 aa, Escherichia coli
MNILLFGKTGQVGWELQRALAPLGNLIAFDVHSTDYCGDFSNPEGVAETVRSIRPDIIVNAAAHTAVDKAESEPEFAQLINATSVEAIAKAANEVGAWVIHYSTDYVFPGNGDMPWLETDATAPLNVYGETKLAGEKALQEYCAKHLIFRTSWVYAGKGNNFAKTMLRLAKEREELAVINDQFGAPTGAELLADCTAHAIRVALNKPDVAGLYHLVASGTTTWYDYAALVFEEARKAGIPLALNKLNAVPTTAYPTPARRPHNSRLNTEKFQQNFALVLPDWQVGVKRMLNELFTTTAI

SEQ ID NO: 1869 - protein, 302 aa, Escherichia coli
MYSCLSGGLGNQMFQYAAAYILQRKLKQRSLVLDDSYFLDCSNRDTRRRFELNQFNICYDRLTTSKEKKEISIIRHVNRYRLPLFVTNSIFGVLLKKNYLPEAKFYEFLNNCKLQVKNGYCLFSYFQDATLIDSHRDMILPLFQINEDLLNLCNDLHIYKKVICENANTTSLHIRRGDYITNPHASKFHGVLPMDYYEKAIRYIEDVQGEQVIIVFSDDVKWAENTFANQPNYYVVNNSECEYSAIDMFLMSKCKNNIIANSTYSWWGAWLNTFEDKIVVSPRKWFAGNNKSKLTMDSWINL

SEQ ID NO: 1870 - protein, 552 aa, Staphylococcus aureus
MKGCLATMDKELWIERANDSLVKHFYEQQSDIEQREGFESKLTFGTAGIRGKFGLGEGRLNKFTIEKLALGLARYLNAQTNSPTIVIHYDIRHLSTEFAQIIANVLANHQITVYLPDTYKTTPELSFAVRNLNTTAGIMITASHNPKDYNGIKVYGSDGAQLSTDASELASRYIEEVGDPLQIDIPISKQNTSYIKPFPKSVTDDYMKHIQNMIGYIPKSDLQVVFTSLHGTSVPIVPELLKSLNFNQFNLVDAQCKPDPNFSSVQSANPEDHRAFDQAVELANKSHADLLISTDPDADRLGIAERDAHGHITYFNGNQIGALLLNYRIQQTSQLRHRLMIQSIVSSELTKSLARYNNVKYKEVLTGFKFIAQEIRQLDDHQNMIFAFEESYGFLSEPFVRDKDAVQIVPLIIKYASELKLYGKTLKDELEQIYQTVGRHEDTLFSHTLEGLEGKKKIESIMTHFRSNPPQEIQGLKVKAIEDYLTSEVYHLDKDTTSQINSSKSNVIRVLFDEGFIALRPSGTEPKIKLYVSLKCPDFDDVAQKINAMIFS

SEQ ID NO: 1871 - protein, 246 aa, Yersinia pseudotuberculosis; identical to SEQ ID NO: 1415

SEQ ID NO: 1872 - protein, 100 aa, Mycobacterium bovis; identical to SEQ ID NO: 1328

SEQ ID NO: 1873 - protein, 388 aa, Bacillus cytotoxicus
MIKNPKVLILTAHYGNGHVQVAKTLEQAFHQKGIEDVIVCDLFGESHPVITDITKYLYLKSYTIGKELYRLFYYGVEKIYDKKIASWYANFGRKRLKALLHTEKPDIVINTFPIIAVPELKKQTGFSIPVYNVLTDFCLHKIWIHREVDRYFVATDHVKQVMIEIGVPAERIVETGIPIRKNFELTMNSELIYNKYQLSREKKILLIVAGAHGVLGNVKDLCASFMSVPNLQVAVVCGKNDALKQELLKLQEQNSEALKVFGYIENIDELFRVTSCMITKPGGITLSEAAALQVPVILYKPVPGQENENAIYFESKGAAVVIREDAEIFEKTKALLEDDRKLLQMKEAMGSIYRPEPAAHIVDVILEENHAQTNHVPMKSPALAQSFT

SEQ ID NO: 1874 - protein, 552 aa, Staphylococcus aureus
MKGCLATMDKELWIERANDSLVKHFYEQQSGIEQRDGFESKLTFGTAGIRGKFGLGEGRLNKFTIEKLALGLARYLNAQTNNPTIVIHYDIRHLSTEFAQIIANVLANHQITVYLPDTYKTTPELSFAVRNLNTAAGIMITASHNPKDYNGIKVYGSDGAQLSTDASELASRYIEEVGDPLQIDIPISKQNTSYIKPFPKSVTDDYMKHIQNMIGYIPKSDLQVVFTSLHGTSVPIVPELLQSLNFNQFNLVEAQCKPDPNFSSVQSANPEDHRAFDQAVELANKSHADLLISTDPDADRLGIAECDAHGHITYFNGNQIGALLLNYRIQQTSQLRHRLMIQSIVSSELTKSLARYNNVEYKEVLTGFKFIAQEIRQLDDHQNMIFAFEESYGFLSEPFVRDKDAVQIVPLIIKYASELKLYGKTLKDALEQIYQTVGRHEDTLFSHTLEGLEGKKKINAIMTKFRSNPPQEIQGLKVKAIEDYLTSEVYQLDKDTTSQINSPKSNVIRVLFDEGFIALRPSGTEPKIKLYVSLKCPNFDDVAQKINAMIFS

SEQ ID NO: 1875 - protein, 288 aa, Staphylococcus aureus; identical to SEQ ID NO: 1371

SEQ ID NO: 1876 - protein, 445 aa, Porphyromonas gingivalis
MKTQEIMTMLEAKHPGESEFLQAVKEVLLSVEEVYNQHPEFEKNGIIERIVEPDRVFTFRVPWVDDQGKVQVNIGYRVQFNNAIGPYKGGIRFHPSVNLSILKFLGFEQMFKNALTTLPMGGGKGGADFSPKGKSEAEIMRFCQSFMTELWRNIGPDTDIPAGDIGVGGREVGYMFGMYKKLAREHTGTLTGKGFEFGGSRLRPESTGFGAVYFVQNMCKQNGVDYKGKTLAISGFGNVAWGVAQKATELGIKVVTISGPDGYVYDPDGINTPEKFRCMLDLRDSGNDVVSDYVKRFPNAQFFPGKKPWEQKVDFAMPCATQNEMNLEDAKTLHKNGVTLVAETSNMGCTAEASEYYVANKMLFAPGKAVNAGGVSCSGLEMTQNAMHLVWTNEEVDKWLHQIMQDIHEQCVTYGKDGNYIDYVKGANIAGFMKVAKAMVAQGVC

SEQ ID NO: 1877 - protein, 359 aa, Salmonella gallinarum; identical to SEQ ID NO: 1297

SEQ ID NO: 1878 - protein, 325 aa, Mycobacterium kansasii
MTDVSGKIRAWGRRLLVGAAAAAALPGLVGLAGGAATAGAFSRPGLPVEYLQVPSAAMGRSIKVQFQSGGDNSPAVYLLDGLRAQDDYNGWDINTPAFEWYYQSGLSVIMPVGGQSSFYSDWYSPACGKAGCTTYKWETFLTSELPQWLSANRSVKPTGSAAVGISMAGSSALILSVYHPQQFIYAGSLSALMDPSQGMGPSLIGLAMGDAGGYKASDMWGPSSDPAWQRNDPSLHIPELVANNTRLWIYCGNGTPSELGGANVPAEFLENFVRSSNLKFQDAYNAAGGHNAVFNLDANGTHSWEYWGAQLNAMKGDLQASLGAR

SEQ ID NO: 1879 - protein, 452 aa, Salmonella newport
MSLMQFSGLLVVWLLSTLFIATLTWFEFRRVRFNFNVFFSLLFLLTFFFGFPLTSVLVFRFDVGVAPPEILLQALLSAACFYGVYYVTYKTRLRKRVVDVPRKPLFTMNRVETHLTWVILMGIALVSVAIFFMHNGFLLFRLHSYSQIFSSEVSGVALKRFFYFFIPAMLVVYFLRQDSKAWLFFLVSTVAFGLLTYMIVGGTRANIIIAFAIFLFIGIIRGWISLWMLAAAGVLGIVGMFWLALKRYGLNVSGDEAFYTFLYLTRDTFSPWENLALLLQNYHNIEFQGLAPIVRDFYVFIPTWLWPGRPSIVLNSANYFTWEVLNNHSGLAISPTLIGSLVVMGGALFIPLGAIVVGMIIKWFDWLYELGNREPNRYKAAILHSFCFGAIFNMIVLAREGLDSFVSRVVFFLVVFGASLLVAKLLFWLFDSAGLIHKRTTSLPQAQVEGKL

SEQ ID NO: 1880 - protein, 202 aa, Pseudomonas aeruginosa
MIVVIDYGVGNIASVLNMLKRVGAKAKASDSREDIEQAEKLILPGVGAFDAGMQTLRKSGLVDVLTEQVMIKRKPVMGVCLGSQMLGLRSEEGAEPGLGWIDMDSVRFERRDDRKVPHMGWNQVSPQLEHPILSGINEQSRFYFVHSYYMVPKDPDDILLSCNYGQKFTAAVARDNVFGFQFHPEKSHKFGMQLFKNFVELV

SEQ ID NO: 1881 - protein, 112 aa, Mycobacterium leprae
MAKKVTVTLVDDFDGAGAADETVEFGLDGVTYEIDLTNKNAAKLRGDLRQWVSAGRRVGGRRRGRSNSGRGRGAIDREQSAAIREWARRNGHNVSTRGRIPADVIDAFHAAT

SEQ ID NO: 1882 - protein, 361 aa, Treponema pallidum
MGRYIVPALLCVAGMGFAHAQSALQPIAEVNLFRREPVTLGQIKARISAIEKEMGKKLSTAERRQFMDSLIDEKLFAQAAEKAGIQVTDAEVNQYFNGMLSQQIGRAVTEAEFANYVKEKQNISLDQFMKQQNGMTMAEYKKFLKTQVSTQRYVAQKKADEFRNLKGPEDSQIRSYYELNKQAFFRPDTVKLFLISVPKGSGPAAAKAKAQEFVKKLKSSGVKATADIKSKANGAQAGYSAGEIYLGKTAVTATQLGLTMEALLEIFGMGVGAVSDVNETANDYQCFIVLKKEEAKILTLSDLVEPDKTVSLYEFIKNLLTSQIQQKALEDAIREVSAELRKSGTYKVFLADAELGKVLDW

SEQ ID NO: 1883 - protein, 167 aa, Mycobacterium leprae
MTMKSIATYAALAIIGAAVDGLTSMAIPTGPAASHIQPVAFGVPLPQDPAPAADVPTAAELTSLLNKIVDPDVSFMHKSQLVEGGIGSAEAHIGDRELKNAAQKGELPLLFSVTNIRPGTSGSATADVSVSGPKLNPPVTQNITFINKGSWVLSRHSAMELLQAAGR

SEQ ID NO: 1884 - protein, 126 aa, Coxiella burnetii
MAQLSKDDILEAVANMSVMDVVDLVKAMEEKFGVSAQAAIAVAGPVAGGEAAAAEEKTEFNVKMVSFGDNKIGVIKAIRTITGLGLKEAKDLVESVPSVVKESVSKEEAEKIKKELEEAGAKVELE

SEQ ID NO: 1885 - protein, 359 aa, Pseudomonas aeruginosa
MIEFIDLKNQQARIKDKIDAGIQRVLRHGQYILGPEVTELEDRLADFVGAKYCISCANGTDALQIVQMALGVGPGDEVITPGFTYVATAETVALLGAKPVYVDIDPRTYNLDPQLLEAAITPRTKAIIPVSLYGQCADFDAINAIASKYGIPVIEDAAQSFGASYKGKRSCNLSTVACTSFFPSKPLGCYGDGGAIFTNDDELATAIRQIARHGQDRRYHHIRVGVNSRLDTLQAAILLPKLEIFEEEIALRQKVAAEYDLSLKQVGIGTPFIEVNNISVYAQYTVRMDNRESVQASLKAAGVPTAVHYPIPLNKQPAVADEKAKLPVGDKAATQVMSLPMHPYLDTASIKIICAALTN

SEQ ID NO: 1886 - protein, 552 aa, Staphylococcus aureus; identical to SEQ ID NO: 1870

SEQ ID NO: 1887 - protein, 246 aa, Escherichia coli; identical to SEQ ID NO: 1281

SEQ ID NO: 1888 - protein, 503 aa, Bartonella henselae
MVKKTFFTTLAAVSFSAALETALFFSGCGSSLWTTKAHANSVFSSLMQQQGFADIVSQVKPAVVSVQVKSNKKKKEWFFSDFFSTPGFDQLPDQHPLKKFFQDFYNRDKPSNKSLQRSHRLRPIAFGSGFFISSDGYIVTNNHVISDGTSYAVVLDDGTELNAKLIGTDPRTDLAVLKVNEKRKFSYVDFGDDSKLRVGDWVVAIGNPFGLGGTVTAGIVSARGRDIGTGVYDDFIQIDAAVNRGNSGGPTFDLNGKVVGVNTAIFSPSGGNVGIAFAIPAATAKQVVQQLIEKGLVQRGWLGVQIQPVTKEISDSIGLKEAKGALITDPLKGPAAKAGIKAGDVIISVNGEKINDVRDLAKRIANMSPGETVTLGVWKSGKEENIKVKLDSMPEDENMKDGSKYSNEHGNSDETLEDYGLIVAPSDDGVGLVVTDVDPDSDAADKGIRPGDVIVTVNNKSVKKVSDITDTIKNAQKLGRKAILLQVRTNDQNRFVALPIFKK

SEQ ID NO: 1889 - protein, 391 aa, Staphylococcus aureus; identical to SEQ ID NO: 1331

SEQ ID NO: 1890 - protein, 552 aa, Staphylococcus aureus; identical to SEQ ID NO: 1774

SEQ ID NO: 1891 - protein, 288 aa, Staphylococcus aureus
MKKIKKAIIPAAGLGTRFLPATKAMPKEMLPILDKPTIQYIVEEAARAGIEDIIIVTGRHKRAIEDHFDSQKELEMVLKEKGKSELLEKVQYSTELANIFYVRQKEQKGLGHAISSARQFIGNEPFAVLLGDDIVESEVPAVKQLIDVYEETGHSVIGVQEVPEADTHRYGIIDPLTKNGRQYEVKKFVEKPAQGTAPSNLAIMGRYVLTPEIFDYLKTQKEGAGNEIQLTDAIERMNNDNQVYAYDFEGERYDVGEKLGFVKTTIEYALKDDSMREELTRFIKELGL

SEQ ID NO: 1892 - protein, 620 aa, Mycobacterium leprae
MARAVGIDLGTTNSVVSVLEGGDPVVVANSEGSRTTPSTVAFARNGEVLVGQPAKNQAVTNVDRTIRSVKRHMGSDWSIEIDGKKYTAQEISARVLMKLKRDAEAYLGEDITDAVITTPAYFNDAQRQATKEAGQIAGLNVLRIVNEPTAAALAYGLDKGEREQTILVFDLGGGTFDVSLLEIGEGVVEVRATSGDNHLGGDDWDDRIVNWLVDKFKGTSGIDLTKDKMAMQRLREAAEKAKIELSSSQSTSVNLPYITVDSDKNPLFLDEQLIRAEFQRITQDLLDRTRQPFQSVVKDAGISVSEIDHVVLVGGSTRMPAVTDLVKELTGGKEPNKGVNPDEVVAVGAALQAGVLKGEVKDVLLLDVTPLSLGIETKGGVMTKLIERNTTIPTKRSETFTTADDNQPSVQIQVYQGEREIASHNKLLGSFELTGIPPAPRGVPQIEVTFDIDANGIVHVTAKDKGTGKENTIKIQEGSGLSKEEIDRMVKDAEAHAEEDRKRREEADVRNQAETLVYQTEKFVKEQRETENGSRVPEDTLNKVEAAVAEAKTALGGTDISAIKSAMEKLGQDSQALGQAIYEATQAASKVGGEASAPGGSNSTDDVVDAEVVDDERESK

SEQ ID NO: 1893 - protein, 376 aa, Escherichia coli
MKVLTVFGTRPEAIKMAPLVHALAKDPFFEAKVCVTAQHREMLDQVLKLFSIVPDYDLNIMQPGQGLTEITCRILEGLKPILAEFKPDVVLVHGDTTTTLATSLAAFYQRIPVGHVEAGLRTGDLYSPWPEEANRTLTGHLAMYHFSPTETSRQNLLRENVADSRIFITGNTVIDALLWVRDQVMSSDTLRSELAANYPFIDPDKKMILVTGHRRESFGRGFEEICHALADIATTHQDIQIVYPVHLNPNVREPVNRILGHVKNVILIDPQEYLPFVWLMNHAWLILTDSGGIQEEAPSLGKPVLVMRDTTERPEAVTAGTVRLVGTDKQRIVEEVTRLLKDENEYQTMSRAHNPYGDGQACSRILEALKNNRISL

SEQ ID NO: 1894 - protein, 330 aa, Mycobacterium scrofulaceum
MTDLSKKVRAWGRRLLVGTAAAVTLPGLIGLAGGAPTAGAFSRPGLPVEYLQVPSAGMGRNIKVQFQSGGNNSPAVYLLDGLRAQDDYNGWDINTPAFEWYYQSGLSIIMPVGGQSSFYSDWYSPACGKAGCTTYKWETFLTSELPQYLQSNKSVKPTGSAAVGISMAGSSALILAAYHPQQFIYAGSLSALMDPSQGMGPSLIGLAMGDAGGYKASDMWGPSSDPAWQRNDPTIQIPKLVGNNTRLWVYCGNGTPSELGGANMPAEFLENFVRSSNLKFQDAYNAAGGHNAVFHFDQNGTHSWEYWGAQLNAMKPDLQGTLGATPGGGG

SEQ ID NO: 1895 - protein, 452 aa, Salmonella paratyphi; identical to SEQ ID NO: 1279

SEQ ID NO: 1896 - protein, 204 aa, Leptospira borgpetersenii U
MIGILDYGVGNLKAFANVLKGLNFHHQIVKTEQELKGCEKIIMPGVGSFDSVMNKLIESGIRDVLSDLIINKKIPILGVCVGMQILASSSEEGSKSGLGWIRGRVKKFNFDRSDFSLTIPQIGWNEVNSTKENTLLKNLEKNPRFYFLHSYYIECEDKKDVIAIANYGGDFTCAVNRENIYGTQFHPEKSHHNGVALIRNFASL

SEQ ID NO: 1897 - protein, 198 aa, Helicobacter pylori
MKKLKGLFLSLLLWVYPLKSEPINEGAYILEEIGDVLRFLPIFVGTVSLAMRDYRGLGELAVGTLVTQGVIYGLKGAFSTAHKDGARVGFAKRPCCNSWRGMPSGHAGGAFSAAGFVYYRYGWKPALPVIALAILTDTSRVVAGQHTILQVTIGSLIAWGFAYLFTSRYKPKRWMLYPEISSDFKGSSRYGVGFSYQW

SEQ ID NO: 1898 - protein, 337 aa, Borreliella bavariensis
MNKLLLLILFECIIFLSCSGKGSLESGIPKVSVIVNGTFDDKSFNESALNGIKKVKEEFKIELVLKESSTNSYLSDLEGLKDAGSNLIWLIGYRFSDVAKAVSLQNPEIKYAIIDPVYSEEPIPTNLVGMTFRAQEGAFLTGYIAAKVSKTGKIGFLGGIEGEIVDAFRYGYEAGAKYANKDIKISAHYIGSFNDVEAGRSVATKMYSDGIDIIHHAASLGGIGAIEVAKELGSGHYIIGVDEDQSYLAPNNIITSATKDVGRSLNIFTSNYLKTNTFEGGRLINYGLKEGVVGFVKNPKMIPFELEKEIDNLSSKIINQEIIVPYNKESYEKFLKE

SEQ ID NO: 1899 - protein, 168 aa, Mycobacterium tuberculosis
MKMVKSIAAGLTAAAAIGAAAAGVTSIMAGGPVVYQMQPVVFGAPLPLDPASAPDVPTAAQLTSLLNSLADPNVSFANKGSLVEGGIGGTEARIADHKLKKAAEHGDLPLSFSVTNIQPAAAGSATADVSVSGPKLSSPVTRNVTFVNQGGWMLSRASAMELLQAAGN

SEQ ID NO: 1900 - protein, 299 aa, Shigella flexneri
MNILLFGKTGQVGWELQRALAPLGNLIALDVHSTDYCGDFSNPEGVAETVKKIRPDVIVNAAAHTAVDKAESEPNFAQLLNATCVEAIAKAANEVGAWVIHYSTDYVFPGNGDTPWLETDATAPLNVYGETKLAGEKALQEHCAKHLIFRTSWVYAGKGNNFAKTMLRLAKEREELAVINDQFGAPTGAELLADCTAHAIRVAANKPEVAGLYHLVAGGTTTWHDYAALVFEEARRAGINLALNKLNAVPTTAYPTPARRPHNSRLNTEKFQQNFALVLPDWQVGVKRMLNELFTTTAI

SEQ ID NO: 1901 - protein, 361 aa, Serratia proteamaculans
MTTLIHVLGSDIPHHNQTVLRFFNDVLAKRLPSDQTRHFMVAAKDAAALGPFPELNLECHPDKKSLAMAVIARAQADRDQRFFFHGQFNPTLWLALLSGKIKAHQVSWHIWGADLYENATSWKFRLFYLLRRIAQGRVGRVFATRGDVIHYQQRHARVPASLLYFPTRMDPALTGISVEKNLAGPMTILVGNSGDRTNRHVEALKAIHQQFGADVRVILPMGYPANNEAYIEQVRTAGLALFSASNLQVLTQQVAFDDYLNILRECDLGYFIFNRQQGIGTLCLLIQFGVPFVLSRQNPFWQDLAEQHLPVLFYGDSLDEAVVREAQRQLASVDKQEIAFFNPNYVDGWQQALALAAGDNS

SEQ ID NO: 1902 - protein, 546 aa, Staphylococcus epidermidis
MKNNWIDVLDESLVKDFYNNQTSEEQQEGLNTTLSFGTAGIRGKFGLGEGRLNKFTVSKVALGFAHYLTSSIAHPVVVIHYDTRHLSPEFAQIIANILASLDIKVYLADTYRTTPDLSFAVRYLQADAGVMITASHNPKDYNGIKVYGEDGAQLSTDDSARLSTYIDKLGHPLHINLPSLTTEQQSLIHSVPSEVREDYFKNVQDLVGTIPQSDLKVVFTSLHGTSVPVVPDILSSLNFNQFELVASQCEPDSDFSSVASANPEDHKAFDQSIELANLIDADLLIGTDPDADRLGIVERDAEGNIYYYNGNQIGALLLNYRIKQTEGLPNRIMFQSIVSGGLAKSLAQYHNVNFKEVLTGFKYIAAEIRHLSPEQNFIFGYEESYGFLARPFVRDKDAIQIVPLMIKYAAELKNEGRMLKDELEDITRNVGNFNDKLFSHTFEGTQGKAKIENIMTQFRSETPTEMCGLKVIAIEDFETGKKTDLQNDEVSDITLPKANVIKIYFNEGFIALRPSGTEPKIKLYVSLSCDHFDVIAQKINDAIFNS

SEQ ID NO: 1903 - protein, 361 aa, Pectobacterium atrosepticum
MTTLIHVLGSDIPHHNQTVLRFFNDVLATELPEHQIRHFIVASHDGISPADFPALRIETCVDKKTLAEAVIARAKSNRKMRFFLHGQFNPTLWLALLSGKIKPEQVCWHVWGADLYEEANGLKYRLFYWLRRMAQKRIGHVFATRGDLAWYEQRAPRVPTSLLYFPTRMDPALTSMKVDKPLAGPMTILVGNSGDRTNRHQEALRAIHKQFGNNVRVIVPMGYPANNASYIAQVEKDGLALFGVKNFQLLKDQLAFDDYLNMLRTCDLGYFIFDRQQGIGTLCLLIQFGVPFVISRKNPFWQDLTEQSLPVLFYGDDLDEALVREAQRQLASVDKHQIAFFNPNYLQGWRDALALATGEPT

SEQ ID NO: 1904 - protein, 93 aa, Mycobacterium tuberculosis; identical to SEQ ID NO: 1812

SEQ ID NO: 1905 - protein, 391 aa, Staphylococcus aureus; identical to SEQ ID NO: 1347

SEQ ID NO: 1906 - protein, 249 aa, Mycobacterium leprae
MTDQPPPSGSNPTPAPPPPGSSGGYEPSFAPSELGSAYPPPTAPPVGGSYPPPPPPGGSYPPPPPPGGSYPPPPPSTGAYAPPPPGPAIRSLPKEAYTFWVTRVLAYVIDNIPATVLLGIGMLIQTLTKQEACVTDITQYNVNQYCATQPTGIGMLAFWFAWLMATAYLVWNYGYRQGATGSSIGKTVMKFKVISEATGQPIGFGMSVVRQLAHFVDAVICCIGFLFPLWDSKRQTLADKIMTTVCLPI

SEQ ID NO: 1907 - protein, 442 aa, Streptococcus agalactiae
MIILFDFFDKKSKDLYYSLITSGLHGNAVVINDDGFLPQNINSPYSFFCNMEGKNGNPLYFNQVPLPDLWEIKGNNIEAEIWDFSIKRAKIFYQEPKYKRQVKNIDWFDNNKKVRYTDHYNRFGWCFARTHFDKNQNVTTKSYFDKDGKEVIVENFRTGVIILNWLNKDYFFDNRVAFLNFYFSLMGWNLSRIWYNSLSTPFFVSYRMTYPGEDILFWQEDIEDTIPANMRVLLESTNTRTQKVIVQKKNTYHKIKSMLPKEQQEKIGYLGFIYPNKKNNKGRKDIFILTNSDQIEHLEVLVHHLSDYHFHIAAYTEMSFKLMSFSQEQNVTLYPNISRTDLDNLFEICDIYFDINHGNEVDDVIRRAFEYNHLIFAFDNTCHNRELVLDSNIISHTTCEQLINLMKNLSGSIMYLLEQQREQTSNETKERYKEILGGYGNA

SEQ ID NO: 1908 - protein, 160 aa, Escherichia coli
MKKLAIMAAASMVFAVSSAHAGFTPSGTTGTTKLTVTEECQVRVGDLTVAKTRGQLTDAAPIGPVTVQALGCDARQVALKADTDNFEQGKFFLISDNNRDKLYVNIRPTDNSAWTTDNGVFYKNDVGSWGGIIGIYVDGQQTNTPPGNYTLTLTGGYWAK

SEQ ID NO: 1909 - protein, 359 aa, Salmonella paratyphi; identical to SEQ ID NO: 1345

SEQ ID NO: 1910 - protein, 340 aa, Mycobacterium bovis; identical to SEQ ID NO: 1370

SEQ ID NO: 1911 - protein, 467 aa, Xanthomonas campestris
MSDVLPIILSGGSGTRLWPLSRETYPKQFLPLVGEHSMLQATWLRSAPVAAHAPIVVANEEHRFMAAEQLQQLGVKPSAILLEPKGRNTAPAIAVAALEATRNGGDPLLLVLPSDHVIRDEAAFQAAVTVAAAAAEQGKLVTFGIKPTAPETGYGYIKAGAGTGATAVERFVEKPDLATAQGYLASGEYYWNSGMFLFRASRYLEELRKFQPAIADACQKAWEGGKRDADFTRLDKDAFASSPSDSIDYAVMEKTADAVVVPLDAGWNDVGSWSSLLDVSEQDGQGNAHHGDVIQLDCKNTYAYGSRLIAMVGLENVVVVETDDAVLVGHRDRIQEVKEVVSQIKSAGRSEATWHRKVYRPWGAYDSIDMGQRFQVKRITVKPGATLSLQMHHHRAEHWIVVSGTAEVTRGDEVLLLTENQSTYIPLGVTHRLKNPGKLPLELIEVQSGSYLGEDDIVRFEDTYGRT

SEQ ID NO: 1912 - protein, 633 aa, Coxiella burnetii
MSLQPQAETLSFEAEVKQLLHLVAHSLYSNKEIFLRELISNSSDAADKLRYQALSDAALYENDADLKIWIDFDKDNRTITIRDNGIGMSREEVIENLGTIAKSGTRAFRELLAEKKAEDSQLIGQFGVGFYSAFIVADRVVVRTRRAGMKADQGVEWESTGEGEYTLKNIDKPTRGTEVVLHLKESEEEFLDPLRLRAIITKYSDHILLPIVMKKIKTSGADDEDKNETPEEEVVNRANALWVLPKDKIKDEEYKELYKHIAHDFEDPLAWVHNKVEGKLEYTTLLYIPARAPFDLWNREGQRGLKLYVKRIFIMDDAEHFMPMYLRFVKGIVDSNDLPLNISRELLQSNEVINKIKAGCVKRILSLLEDLAKNDKEKYASFWKAFGQVLKEGPAEDFANRDRIANLLRFASTHNDTDEQNVSLQDYISRMKPEQNKIYYIVADTYTSAKNSPLLEVFRKKDIEVLLMSDRVDEWLVAHLNEFEGKSLQSIAKGTLDLGDLEKEEKVETEKFEKDFDELLKQFKEVLGEKIKDVRITHRLTDSPTCVVFDENEMSGHLQRLLIQTGQDFMQAKPILEINPSHPLILRVKNESDKTRFNRWADLLLNQALLAEGEQLKDPASFVKGLNELLLDS

SEQ ID NO: 1913 - protein, 456 aa, Leptospira interrogans
MNSNPKKKFLKLIKIKSDIILLIPIFLFLVCCKSGDFSLLSSPINREKNGTEIVKFSIHPYKGTVIRLGEEILPFKVLEMDKNIALVEMAIPVYKDEKEIELKLSSPGFQNSSYRIRKPEELNEKLIALDKEGITHRFISRFKTGFQPKSVRFIDNTRLAIPLLEDEGMDVLDINSGQTVRLSPPEKYKKKLGFVETISIPEHNELWVSQMQANAVHVFDLKTLAYKATVDLTGKWSKILLYDPIRDLVYCSNWISEDISVIDRKTKLEIRKTDKIGLPRGLLLSKDGKELYIAQFSASNQESGGGRLGIYSMDKEKLIDTIGPPGNKRHIVSGNTENKIYVSDMCCSKIEVYDLKEKKVQKSIPVFDKPNTIALSPDGKYLYVSCRGPNHPTEGYLKKGLVLGKVYVIDTTTDTVKEFWEAGNQPTGLDVSPDNRYLVISDFLDHQIRVYRRDGF

SEQ ID NO: 1914 - protein, 325 aa, Borreliella afzelii
FLSCSGKSGLESGIPKVSLVIDGTFDDKSFNESALNGVKKLKEEFEIELVLKESSTNSYLSDLEGLKDAGSNLIWLIGYKFSDVAKAVSLQNSEMKYAIIDPVYSNEPIPANLVGMTFRAQEGAFLTGYIAAKVSKTGKIGFLGGIEGDIVDAFRYGYEAGAKYANKDIKIFSQYIGSFSDLEAGRSVATKMYSDGIDIIHHAAGLGGIGAIEVAKELGSGHYIIGVDEDQSYLAPNNVITSTTKDVGRSLNLLTSNYLKTNTFEGGKLINYGLKEGVVGFVRNPKMIPFEVEKEIDSLSSKIINKEVIVPYNKESYEKFLKEFI

SEQ ID NO: 1915 - protein, 168 aa, Mycobacterium tuberculosis
MKMVKSIAAGLTAAAAIGAAAAGVTSIMAGGPVVYQMQPVVFGAPLPLDPASAPDVPTAAQLTSLLNSLADPNVSFANKGSLVEGGIGGTEARIADHKLKKAAEHGDLPLSFSVTNIQPAAAGSATADVSVSGPKLSSPVTQNVTFVNQGGWMLSRASAMELLQAAGN

SEQ ID NO: 1916 - protein, 293 aa, Escherichia coli
MKMRKGIILAGGSGTRLYPVTMAVSKQLLPIYDKPMIYYPLSTLMLAGIRDILIISTPQDTPRFQQLLGDGSQWGLNLQYKVQPSPDGLAQAFIIGEEFIGGDDCALVLGDNIFYGHDLPKLMEAAVNKESGATVFAYHVNDPERYGVVEFDKNGTAISLEEKPLEPKSNYAVTGLYFYDNDVVQMAKNLKPSARGELEITDINRIYLEQGRLSVAMMGRGYAWLDTGTHQSLIEASNFIATIEERQGLKVSCPEEIAFRKGFIDVEQVRKLAVPLIKNNYGQYLYKMTKDSN

SEQ ID NO: 1917 - protein, 359 aa, Shigella boydii
MTVLIHVLGSDIPHHNRTVLRFFNDALAATSEHAREFMVVGKDDGLSDSCPALSVQFFPGKKSLAEAVIAKAKANRQQRFFFHGQFNPTLWLALLSGGIKPSQFFWHIWGADLYELSSGLRYKLFYPLRRLAQKRVGCVFATRGDLSFFAKTHPKVRGELLYFPTRMDPSLNTMANDRQREGKMTILVGNSGDRSNDHIAALRAVHQQFGDTVKVVVPMGYPPNNEAYIEEVRQAGLELFSEENLQILSEKLEFDAYLALLRQCDLGYFIFARQQGIGTLCLLIQAGIPCVLNRENPFWQDMTEQHLPVLFTTDDLNEDIVREAQRQLASVDKNTIAFFSPNYLQGWQRVLAIAAGEVA

SEQ ID NO: 1918 - protein, 548 aa, Staphylococcus haemolyticus
MKDNWMKYKDDSLVASFYDSQTTTFQEQGFETELAFGTAGIRGQFGLGPGRLNRYTIQRLALGIANYLKDKEDNPSIVIHYDIRHLSSEFAHIITQILTSKGIKVYLADVYKTTPQLSFAVRYLQTSAGIMITASHNPKDYNGIKVYGADGAQLDEDTSLEVAQYINNLGNPLELNIDLNQELIEKNTFDLQEAVYDSYINEITNLIGDIPQSDLKVVYTSLHGTGVPIIPDVLKHLNFQNVSLVELQCELDPNFSSVKSANPEEREAFDLAIQQAHDLEANLIIATDPDVDRMGFVERDTNGQTYYFGGSEIGALLIKYLLEYTNVPNHSVVIQSIVSGELGKRLAQQHEVTVKEVLIGFKHIAKAIRELDDTESFLFAYEESYGYLADDFVRDKDAIQIVPLIIKYTSILKNEGKTLHDALKEIHREVGQYRDKPMSKVFEGREGQQQINALMDKLRRNIPDVIAGLKVIAVEDYETLKRNYKEDNTEEAISLPQANVIRILFKEGFIALRPSGTEPKLKFYLSLNVDNFEQVSQDIYNYIFGDTE

SEQ ID NO: 1919 - protein, 246 aa, Escherichia coli; identical to SEQ ID NO: 1265

SEQ ID NO: 1920 - protein, 338 aa, Mycobacterium tuberculosis
MSAKLTDLQLLHELEPVVEKYLNRHLSMHKPWNPHDYIPWSDGKNYYALGGQDWDPDQSKLSDVAQVAMVQNLVTEDNLPSYHREIAMNMGMDGAWGQWVNRWTAEENRHGIALRDYLVVTRSVDPVELEKLRLEVVNRGFSPGQNHQGHYFAESLTDSVLYVSFQELATRISHRNTGKACNDPVADQLMAKISADENLHMIFYRDVSEAAFDLVPNQAMKSLHLILSHFQMPGFQVPEFRRKAVVIAVGGVYDPRIHLDEVVMPVLKKWRIFEREDFTGEGAKLRDELALVIKDLELACDKFEVSKQRQLDREARTGKKVSAHELHKTAGKLAMSRR

SEQ ID NO: 1921 - protein, 391 aa, Staphylococcus aureus; identical to SEQ ID NO: 1347

SEQ ID NO: 1922 - protein, 240 aa, Mycobacterium tuberculosis
MTEQPPPGGSYPPPPPPPGPSGGHEPPPAAPPGGSGYAPPPPPSSGSGYPPPPPPPGGGAYPPPPPSAGGYAPPPPGPAIRTMPTESYTPWITRVLAAFIDWAPYVVLVGIGWVIMLVTQTSSCVTSISEYDVGQFCVSQPSMIGQLVQWLLSVGGLAYLVWNYGYRQGTIGSSIGKSVLKFKVVSETTGQPIGFGMSVVRQLAHFIDAIICFVGFLFPLWDAKRQTLADKIMTTVCVPI

SEQ ID NO: 1923 - protein, 306 aa, Escherichia coli
MKISLVVPVFNEEEAIPIFYKTVREFEELKSYEVEIVFINDGSKDATESIINALAVSDPLVVPLSFTRNFGKEPALFAGLDHATGDAIIPIDVDLQDPIEVIPHLIEKWQAGADMVLAKRSDRSTDGRLKRKTAEWFYKLHNKISNPKIEENVGDFRLMSRDVVENIKLMPERNLFMKGILSWVGGKTDIVEYVRAERIAGDTKFNGWKLWNLALEGITSFSTFPLRIWTYIGLVVASVAFIYGAWMILDTIIFGNAVRGYPSLLVSILFLGGIQMIGIGVLGEYIGRTYIETKKRPKYIIKRVKK

SEQ ID NO: 1924 - protein, 144 aa, Helicobacter pylori
MKTFEILKHLQADAIVLFMKVHNFHWNVKGTDFFNVHKATEEIYEEFADMFDDLAERIVQLGHHPLVTLSEAIKLTRVKEETKTSFHSKDIFKEILEDYKYLEKEFKELSNTAEKEGDKVTVTYADDQLAKLQKSIWMLQAHLA

SEQ ID NO: 1925 - protein, 246 aa, Salmonella agona
MTNNAAAPLYSLRGLPLIGWRDMSHALNYLFADGQLKQGTLVAINAEKLLTAEDNPEVRALIAAAEFKYADGISVVRSIRKKFPQAQVSRVAGADLWEALMARAGKEGTPVFLVGGKPEVLAQTEAKLRTQWNVNIVGSQDGYFTPEQRQALFARIHASGAKIVTVAMGSPKQELLMRDCREVHPHALYMGVGGTYDVFTGHVKRAPKIWQNLGLEWLYRLLSQPKRITRQVRLLRYLRWHYTGDL

SEQ ID NO: 1926 - protein, 338 aa, Mycobacterium bovis; identical to SEQ ID NO: 1402

SEQ ID NO: 1927 - protein, 450 aa, Shigella dysenteriae
MSLLQFSGLFVVWLLCTLFIATLTWFEFRRVRFNFNVFFSLLFLLTFFFGFPLTSVLVFRFDVGVAPPEILLQALLSAGCFYAVYYVTYKTRLRKRVADVPRRPLFTMNRVETNLTWMILMGIALVSVGIFFMHNGFLLFRLNSYSQIFSSEVSGVALKRFFYFFIPAMLVVYFLRQDSKAWLFFLVSTVAFGLLTYMIVGGTRANIIIAFAIFLFIGIIRGWISLWMLAAAGVLGIVGMFWLALKRYGMNVSGDEAFYTFLYLTRDTFSPWENLALLLQNYDNIDFQGLAPIVRDFYVFIPSWLWPGRPSMVLNSANYFTWEVLNNHSGLAISPTLIGSLVVMGGALFIPLGAIVVGLIIKWFDWLYELGNRETNRYKAAILHSFCFGAIFNMIVLAREGLDSFVSRVVFFIVVFGACLMIAKLLYWLFESAGLIHKRTKSSLRTQVEG

SEQ ID NO: 1928 - protein, 288 aa, Staphylococcus aureus; identical to SEQ ID NO: 1371

SEQ ID NO: 1929 - protein, 144 aa, Mycobacterium avium
MRWPMQNRTTAVIAVALATTALVACSSRSASAVSSTATVTVDGKDSTMHIVKCTQLEWYRMINIGSDFAGAKIVIDQRAHPVTAESVRIQNLNGFTGMYSRGGDGNADLRLSGDKFTITGTAHGYKADKPGDAATATFKIVTAC

SEQ ID NO: 1930 - protein, 341 aa, Borrelia burgdorferi
MRIVIFIFGILLTSCFSRNGIESSSKKIKISMLVDGVLDDKSFNSSANEALLRLKKDFPENIEEVFSCAISGVYSSYVSDLDNLKRNGSDLIWLVGYMLTDASLLVSSENPKISYGIIDPIYGDDVQIPENLIAVVFRVEQGAFLAGYIAAKKSFSGKIGFIGGMKGNIVDAFRYGYESGAKYANKDIEIISEYSNSFSDVDIGRTIASKMYSKGIDVIHFAAGLAGIGVIEAAKNLGDGYYVIGADQDQSYLAPKNFITSVIKNIGDALYLITGEYIKNNNVWEGGKVVQMGLRDGVIGLPNANEFEYIKVLERKIVNKEIIVPCNQEEYEIFIKQILKL

SEQ ID NO: 1931 - protein, 310 aa, Streptococcus pyogenes
MGKKMSLILGAFLSVFLLVACSSTGTKTAKSDKLKVVATNSIIADMTKAIAGDKIDLHSIVPIGQDPHEYEPLPEDVEKTSNADVIFYNGINLEDGGQAWFTKLVKNAQKTKNKDYFAVSDGIDVIYLEGASEKGKEDPHAWLNLENGIIYSKNIAKQLIAKDPKNKETYEKNLKAYVAKLEKLDKEAKSKFDAIAENKKLIVTSEGCFKYFSKAYGVPSAYIWEINTEEEGTPDQISSLIEKLKVIKPSALFVESSVDRRPMETVSKDSGIPIYSEIFTDSIAKKGKPGDSYYAMMKWNLDKISEGLAK

SEQ ID NO: 1932 - protein, 293 aa, Escherichia coli
MKTRKGIILAGGSGTRLYPVTMAVSKQLLPIYDKPMIYYPLSTLMLAGIRDILIISTPQDTPRFQQLLGDGSQWGLNLQYKVQPSPDGLAQAFIIGEDFIGGDDCALVLGDNIFYGHDLPKLMEAAVNKESGATVFAYHVNDPERYGVVEFDNNGTAISLEEKPLEPKSNYAVTGLYFYDNDVVEMARKNLKPSARGELEITDINRIYMEQGRLSVAMMGRGYAWLDTGTHQSLIEASNFIATIEERQGLKVSCPEEIAYRKGFIDAEQVKVLAEPLKKNAYGQYLLKMIKGY

SEQ ID NO: 1933 - protein, 359 aa, Shigella dysenteriae
MTVLIHVLGSDIPHHNRTVLRFFNDALAATSEHAREFMVVGKDDGLSDSCPALSVQFFPGKKSLAEAVIAKAKANRQQRFFFHGQFNPKLWLALLSGGIKSRQFFWHIWGADLYELSSGLIYKLFYPLRRLAQKRVGCVFATRGDLSFFAKTHPKVRGELLYFPTRMDPSLNTLANDRQREGKMTILVGNSGDRSNEHVAALRAVHQQFGDTVKVVVPMGYPPNNEAYIEEVRQAGLELFSEENLQVLSEKLEFDAYLALLRQCDLGYFIFARQQGIGTLCLLIQAGIPCVLNRENPFWQDMTEQHLPVLFTTDDLNEDIVREAQRQLASVDKNTIAFFSPNYLQGWQRALAIAAGEVA

SEQ ID NO: 1934 - protein, 282 aa, Rickettsia prowazekii
MKKLSVIFLSVSMLSSIAFGDEDKVVATYKGGEVKESQIMQEFKPQLNLQSGETIKNFDDFPLQDQEKLIKIYVNNLLLKEEVAKSSITSSKEFQEKLENAKNQLAQQELLANYIKSNITDKMFDDEYNKYVDNLKGKEQIKVAHILVKSQKEANTVKTKLSKGGNFTKLAEEFSLDKATASNGGIIGYIILNQPGQLVPEFEQKAFALKVNEVSTPVKTSFGWHIIKVLEKKPVPIPTKEEAKVTIDNILAAEILKQYISDLEAKADLKIMLPKANSKTGS

SEQ ID NO: 1935 - protein, 361 aa, Photorhabdus luminescens
MTTLIHVLGSDIPHHNRTVLRFFNDVLVQEIGFLAKPKFMVVTKNRALLDDCPALDMAFFDSKKSLAQAVIAQACSDRDCRFFFHGQFNVSLWLALLSGKIKRHQFWWHAWGADLYEDSQQLKFRLFYFLRRLAQRRVGHVFAVRGDLYFYSQHHPNVPTSLLYFPTRMEPALTIAERVPVEDGKMTILLGNSGDRSNRHITALKVIHKQFGDKVRIIIPMGYPENNQVYINQVEQAALSLFRPENLNIIKQNMAFDDYLALLRRCDLGYFMFNRQQGIGTICLLIQFGVPFVLSRQNLFWRDLIEQQVPVFFAGNPLDSQLIAEAQRQMLSLDRNVIAFFSPNFIDGWRQALAKAAGEQQ

SEQ ID NO: 1936 - protein, 657 aa, Corynebacterium melassecola
MRDTAFRSIKAKAQAKRRSLWIAAGAVPTAIALTMSLAPMASAQSSNLSSDAVVGSIAQGVTDGLTDYLKPRVEELPAGEVTYPEIAGLPDGVRVISAEWATSKHVILTIQSAAMPERPIKVQLLLPRDWYSSPNREFPEIWALDGLRAIEEQSGWTIETNIEQYYADKNAIVVLPIGGESSFYSDWEEPNNGKNYQWETFLTQELAPILDKGFRSNTDRAITGISMGGTAAVNIATHHPDMFKFVGSFSGYLDTTSAGMPIAISAALADAGGYDANAMWGPVGSERWQENDPKSNVDKLKGKTIYVSSGNGADDFGKEDSVAIGPANATGVGLEVISRMTSQTFVDRANQAGVEVVASFRPSGVHSWEYWQFEMTQAFPHIANALGMSTEDRGVECAPVGAIADAVADGAMGTCLTNEYDVTGGKAQDFANGRAYWSANTGAFGLVGRINARYSELGGPDSWLGYPTSSELKTPDGRGRFVTFEHGSIYWTATTGPWEIPGDMLAAWGTQDYEKGSLGYPTGAAVEYNGGLRQQFEGGYVFRTSNNQSYWVRGEISKKYADDGIFAQLGFPTGNEKLINGGAFQEFEKGNIYWSVSTGAHVILHGDIFDAWGAKGWEQGEYGFPTSDQTAITAGGQTIDFQNGTIRQVNGRIEESR

SEQ ID NO: 1937 - protein, 391 aa, Staphylococcus aureus; identical to SEQ ID NO: 1331

SEQ ID NO: 1938 - protein, 240 aa, Mycobacterium tuberculosis; identical to SEQ ID NO: 1922

SEQ ID NO: 1939 - protein, 344 aa, Aggregatibacter actinomycetemcomitans
MKTAIVTGASGQDGAYLSQLLLDKGYKVYATYRRSSSVNLWRIDELNIRNHPNLHLFEFDLTDMSSCISLVTKAQPGEVYNLAAQSFVGVSFSQPVTTAEITAIGVLNLLEAIRIINPKIKFYQASTSEMFGKVQQIPQTEKTPFYPRSPYGVAKLYGHWITLNYRESYDIFGCSGILFNHESPLRGREFVTRKITDTVAKIALNKQSCLELGNLDAKRDWGFAKEYVEGMWRMLQEDQPDTYVLATNRTETVRDFVAMAFQAVNIPLEFNGKGENEIGVNTDTGDVLVRVNKEYYRPAEVDLLIGDYSKAKRILGWEPKTSLEELCKMMIEADIERNKLGFSF

SEQ ID NO: 1940 - protein, 1174 aa, Yersinia pestis
MKALMVRTDFSLGESALKAENAVKIARDAGYTAVISADSMNIASVIPLQRAAGDDMAVICGVKLNVVDDPTYEHRARLAKESERCMESLVRDRSYCFTALIKNEQGYRDVCELMTLANKREQFYFVPRLALDQLAAAYAKGNIILLTSDIGSVFQRRDFAKIIGTLVTAGGRDNFYSVVYPHPTPFYDQINVRAMKVASALKIEPVAFYPAYYEAVDDADIKDIAHMVTNNIKIDQPHRLRIPHQRDNAVNGRRHLLEALKAFSVRMDVPVTAAMASTTQDTIIEACTWRWHELPPALPKMADDEPATLMKLAVAGLRKRLTTKEFGYTPPASEHRVYVDRLKYEMDTLTRLGFCGYFLMVRDLMNHSRETGIPVGPGRGSSAGSLVAWCIGITNVDPIRHGLLFERFINPERLDLPDADLDFSQARRHEVIEYLNERYGEDYVAGIPNFTYLGAASALRDTARIYGVDAADMAVSKEFKNLEDDSLSLEELREQLASLDKYATKYPEAFKAACKLQSLMRGFGRHAAGMIVAGVPLVERTPVELRGNARCIAFDKRYCEAMGLIKLDVLGLATLDLLDSAKRYIKESTGEDINLDAIPLDDRKVLDGFAAGYTQGVFQLESGPMRKLLKDLGGGIEPMSFKTVVATTALFRPGPIQSGMLDDYVSVAKGFMAPQSLHPVLDELTAETNGVILYQEQTMNATRLLAGFTMAEADGVRKAIGKKDMEKMKSMGEKFVVQAQAGWIDVEMEDGTTQRIHRAEHFKCEDGALRTVEEALEAGVKLPMAAVRVTGSQPGLSETKAKEIWDAFEKNGAYQFNKSHPVAYSLISYQSMWLKTHYPAEFFAAALTILGEDKHQGLVKDALTYGIHVLPPDVNVSSNRIEIRTLEDGSQVLYAPFSAVKGCSENGCQAIMRAREKVGGKFESLEQFEEAVEKRACACNSRVRESLQKVGAFASIEPGSLPATDPERLRDQAELMGNLVIDAVKASRPFEMNPKRSAEVNVLMTRMAAEMGLGDDLIRPSIGIKPKIMVILDNANGNDGRTGYFMENGYDDFKAKLLTAGDLRMGDLYVTGVCKKVKDKEKDYTKDEIGQFTDFMREEINLVRPTYVLTCGSRATSLFNNKSKPSDLVGRKEYLPELDVTVFYGFNPNILYFRPEEGEKLEAILAEVAETISK

SEQ ID NO: 1941 - protein, 246 aa, Salmonella gallinarum; identical to SEQ ID NO: 1293

SEQ ID NO: 1942 - protein, 147 aa, Brucella abortus
MNSFRKTCAGALALIFGATSIVPTVAAPMNMDRPAINQNVIQARAHYRPQNYNRGHRPGYWHGHRGYRHYRHGYRRHNDGWWYPLAAFGAGAIIGGAISQPRPVYRAPAGSPHVQWCYSRYKSYRASDNTFQPYNGPRKQCRSPYSR

SEQ ID NO: 1943 - protein, 450 aa, Shigella flexneri
MSLLQFSGLFVVWLLCTLFIATLTWFEFRRVRFNFNVFFSLLFLLTFFFGFPLTSVLVFRFDVGVAPPEILLQVLLSAGCFYAVYYVTYKTRLRKRVADVPRRPLFTMNRVETNLTWVILMGIALVSVGIFFMHNGFLLFRLNSYSQIFSSEVSGVALKRFFYFFIPAMLVVYFLRQDSKAWLFFLVSTVAFGLLTYMIVGGTRANIIIAFAIFLFIGIIRGWISLWMLAAAGVLGIVGMFWLALKRYGMNVSGDEAFYTFLYLTRDTFSPWENLALLLQNYDNIDFQGLAPIVRDFYVFIPSWLWPGRPSMVLNSANYFTWEVLNNHSGLAISPTLIGSLVVMGGALFIPLGAIVVGLIIKWFDWLYELGNRETNRYKAAILHSFCFGAIFNMIVLAREGLDSFVSRVVFFIVVFGACLMIAKLLYWLFESAGLIHKRTKSSLRTQVEG

SEQ ID NO: 1944 - protein, 238 aa, Mycobacterium leprae
MQAPKHHRRLFAVLATLNTATAVIAGCSSGSNLSSGPLPDATTWVKQATDITKNVTSAHLVLSVNGKITGLPVKTLTGDLTTHPNTVASGNATITLDGADLNANFVVVDGELYATLTPSKWSDFGKASDIYDVASILNPDAGLANVLANFTGAKTEGRDSINGQSAVRISGNVSADAVNKIAPPFNATQPMPATVWIQETGDHQLAQIRIDNKSSGNSVQMTLSNWDEPVQVTKPQVS

SEQ ID NO: 1945 - protein, 189 aa, Mycobacterium tuberculosis
MRRNIRVTLGAATIVAALGLSGCSHPEFKRSSPPAPSLPPVTSSPLEAAPITPLPAPEALIDVLSRLADPAVPGTNKVQLIEGATPENAAALDRFTTALRDGSYLPMTFAANDIAWSDNKPSDVMATVVVTTAHPDNREFTFPMEFVSFKGGWQLSRQTAEMLLAMGNSPDSTPSATSPAPAPSPTPPG

SEQ ID NO: 1946 - protein, 151 aa, Coxiella burnetii
MSIEVGQKAPIFTLPTDEGEMLSLDDLKGKKVILYFYPKDDTPGCTKEACGFRDVWSQLSKAGVVVLGISKDSVKAHQSFKQKYNLPFTLLSDKDNTVCEQYGVMVDKNRFGKKYKGIERTTFLIDEEGVISAVWPKVKVDGHVAEVVGRL

SEQ ID NO: 1947 - protein, 310 aa, Streptococcus pyogenes; identical to SEQ ID NO: 1931

SEQ ID NO: 1948 - protein, 295 aa, Xanthomonas campestris; identical to SEQ ID NO: 1836

SEQ ID NO: 1949 - protein, 359 aa, Shigella flexneri; identical to SEQ ID NO: 1271

SEQ ID NO: 1950 - protein, 221 aa, Escherichia coli
MNLYGIFGAGSYGRETIPILNQQIKQECGSDYALVFVDDVLAGKKVNGFEVLSTNCFLKAPYLKKYFNVAIANDKIRQRVSESILLHGVEPITIKHPNSVVYDHTMIGSGAIISPFVTISTNTHIGRFFHANIYSYVAHDCQIGDYVTFAPGAKCNGYVVIEDNAYIGSGAVIKQGVPNRPLIIGAGAIIGMGAVVTKSVPAGITVCGNPAREMKRSPTSI

SEQ ID NO: 1951 - protein, 246 aa, Yersinia pseudotuberculosis; identical to SEQ ID NO: 1415

SEQ ID NO: 1952 - protein, 93 aa, Mycobacterium bovis; identical to SEQ ID NO: 1812

SEQ ID NO: 1953 - protein, 391 aa, Staphylococcus aureus; identical to SEQ ID NO: 1347

SEQ ID NO: 1954 - protein, 176 aa, Mycobacterium tuberculosis
MHPMIPAEYISNIIYEGPGADSLFFASGQLRELAYSVETTAESLEDELDELDENWKGSSSDLLADAVERYLQWLSKHSSQLKHAAWVINGLANAYNDTRRKVVPPEEIAANREERRRLIASNVAGVNTPAIADLDAQYDQYRARNVAVMNAYVSWTRSALSDLPRWREPPQIYRGG

SEQ ID NO: 1955 - protein, 323 aa, Pseudomonas aeruginosa
MTRSALVTGITGQDGAYLAKLLLEKGYRVHGLVARRSSDTRWRLRELGIEGDIQYEDGDMADACSVQRAVIKAQPQEVYNLAAQSFVGASWNQPVTTGVVDGLGVTHLLEAIRQFSPETRFYQASTSEMFGLIQAERQDENTPFYPRSPYGVAKLYGHWITVNYRESFGLHASSGILFNHESPLRGIEFVTRKVTDAVARIKLGKQQELRLGNVDAKRDWGFAGDYVEAMWLMLQQDKADDYVVATGVTTTVRDMCQIAFEHVGLDYRDFLKIDPAFFRPAEVDVLLGNPAKAQRVLGWKPRTSLDELIRMMVEADLRRVSRE

SEQ ID NO: 1956 - protein, 747 aa, Mycobacterium tuberculosis
MTTKKFTPTITRGPRLTPGEISLTPPDDLGIDIPPSGVQKILPYVMGGAMLGMIAIMVAGGTRQLSPYMLMMPLMMIVMMVGGLAGSTGGGGKKVPEINADRKEYLRYLAGLRTRVTSSATSQVAFFSYHAPHPEDLLSIVGTQRQWSRPANADFYAATRIGIGDQPAVDRLLKPAVGGELAAASAAPQPFLEPVSHMWVVKFLRTHGLIHDCPKLLQLRTFPTIAIGGDLAGAAGLMTAMICHLAVFHPPDLLQIRVLTEEPDDPDWSWLKWLPHVQHQTETDAAGSTRLIFTRQEGLSDLAARGPHAPDSLPGGPYVVVVDLTGGKAGFPPDGRAGVTVITLGNHRGSAYRIRVHEDGTADDRLPNQSFRQVTSVTDRMSPQQASRIARKLAGWSITGTILDKTSRVQKKVATDWHQLVGAQSVEEITPSRWRMYTDTDRDRLKIPFGHELKTGNVMYLDIKEGAEFGAGPHGMLIGTTGSGKSEFLRTLILSLVAMTHPDQVNLLLTDFKGGSTFLGMEKLPHTAAVVTNMAEEAELVSRMGEVLTGELDRRQSILRQAGMKVGAAGALSGVAEYEKYRERGADLPPLPTLFVVVDEFAELLQSHPDFIGLFDRICRVGRSLRVHLLLATQSLQTGGVRIDKLEPNLTYRIALRTTSSHESKAVIGTPEAQYITNKESGVGFLRVGMEDPVKFSTFYISGPYMPPAAGVETNGEAGGPGQQTTRQAARIHRFTAAPVLEEAPTP

SEQ ID NO: 1957 - protein, 246 aa, Salmonella heidelberg; identical to SEQ ID NO: 1277

SEQ ID NO: 1958 - protein, 236 aa, Mycobacterium leprae
MPNRRRCKLSTAISTVATLAIASPCAYFLVYEPTASAKPAAKHYEFKQAASIADLPGEVLDAISQGLSQFGINLPPVPSLTGTDDPGNGLRTPGLTSPDLTNQELGTPVLTAPGTGLTPPVTGSPICTAPDLNLGGTCPSEVPITTPISLDPGTDGTYPILGDPSTLGGTSPISTSSGELVNDLLKVANQLGASQVMDLIKGVVMPAVMQGVQNGNVAGDLSGSVTPAAISLIPVT

SEQ ID NO: 1959 - protein, 174 aa, Mycoplasma hyorhinis
MKKSIFSKKLLVSFGSLVALASIPLIAISCGQTNTDKSQQPGSGSSTSGGQSGTGLGSGTTTGGQSGTTTGGRSGSGSSSSTTGGQTGTGSDSQDSGAKGTGSDSQDSGAKGTGSDSQDSGAKGTGSDSQDSGAKGTGSDSQDSGAKGTGSDSQDSGAKGTGSDSQDSGNGSTK

SEQ ID NO: 1960 - protein, 236 aa, Mycobacterium tuberculosis; identical to SEQ ID NO: 1482

SEQ ID NO: 1961 - protein, 159 aa, Mycobacterium bovis; identical to SEQ ID NO: 1354

SEQ ID NO: 1962 - protein, 250 aa, Brucella melitensis
MNTRASNFLAASFSTIMLVGAFSLPAFAQENQMTTQPARIAVTGEGMMTASPDMAILNLSVLRQAKTAREAMTANNEAMTKVLDAMKKAGIEDRDLQTGGINIQPIYVYPDDKNNLKEPTITGYSVSTSLTVRVRELANVGKILDESVTLGVNQGGDLNLVNDNPSAVINEARKRAVANAIAKAKTLADAAGVGLGRVVEISELSRPPMPMPIARGQFRTMLAAAPDNSVPIAAGENSYNVSVNVVFEIK

SEQ ID NO: 1963 - protein, 309 aa, Streptococcus pneumoniae; identical to SEQ ID NO: 1643

SEQ ID NO: 1964 - protein, 289 aa, Yersinia enterocolitica
MKGIVLAGGAGTRLHPITRGVSKQLLPVYDKPMIYYPISVLMLAGIQDILIISTPEDLPSFKRLLGDGSQFGIRLQYAKQPSPDGLAQAFIIGEEFIAGERCALVLGDNIYFGQSFGKQLREVASRNDGATVFGYQVVDAERFGVIEFDENFNALSIEEKPQKPKSDWAVTGLYFYDKDVVEMAKEIKPSERGELEITTLNEMYLAKGKLRVELLGRGFAWLDTGTHDSLIDASLFIHTIEKRQGFKVACLEEIAYQNQWLSREKLNELAEALNKTYYGQYLLKLAKES

SEQ ID NO: 1965 - protein, 246 aa, Salmonella paratyphi; identical to SEQ ID NO: 1293

SEQ ID NO: 1966 - protein, 923 aa, Mycobacterium tuberculosis
MSFVVTAPPVLASAASDLGGIASMISEANAMAAVRTTALAPAAADEVSAAIAALFSSYARDYQTLSVQVTAFHVQFAQTLTNAGQLYAVVDVGNGVLLKTEQQVLGVINAPTQTLVGRPLIGDGTHGAPGTGQNGGAGGILWGNGGNGGSGAPGQPGGRGGDAGLFGHGGHGGVGGPGIAGAAGTAGLPGGNGANGGSGGIGGAGGAGGNGGLLFGNGGAGGQGGSGGLGGSGGTGGAGMAAGPAGGTGGIGGIGGIGGAGGVGGHGSALFGHGGINGDGGTGGMGGQGGAGGNGWAAEGITVGIGEQGGQGGDGGAGGAGGIGGSAGGIGGSQGAGGHGGDGGQGGAGGSGGVGGGGAGAGGDGGAGGIGGTGGNGSIGGAAGNGGNGGRGGAGGMATAGSDGGNGGGGGNGGVGVGSAGGAGGTGGDGGAAGAGGAPGHGYFQQPAPQGLPIGTGGTGGEGGAGGAGGDGGQGDIGFDGGRGGDGGPGGGGGAGGDGSGTFNAQANNGGDGGAGGVGGAGGTGGTGGVGADGGRGGDSGRGGDGGNAGHGGAAQFSGRGAYGGEGGSGGAGGNAGGAGTGGTAGSGGAGGFGGNGADGGNGGNGGNGGFGGINGTFGTNGAGGTGGLGTLLGGHNGNIGLNGATGGIGSTTLTNATVPLQLVNTTEPVVFISLNGGQMVPVLLDTGSTGLVMDSQFLTQNFGPVIGTGTAGYAGGLTYNYNTYSTTVDFGNGLLTLPTSVNVVTSSSPGTLGNFLSRSGAVGVLGIGPNNGFPGTSSIVTAMPGLLNNGVLIDESAGILQFGPNTLTGGITISGAPISTVAVQIDNGPLQQAPVMFDSGGINGTIPSALASLPSGGFVPAGTTISVYTSDGQTLLYSYTTTATNTPFVTSGGVMNTGHVPFAQQPIYVSYSPTAIGTTTFN

SEQ ID NO: 1967 - protein, 359 aa, Salmonella heidelberg
MTVLIHVLGSDIPHHNHTVLRFFNDTLAATSEHAREFMVAGEDNGFTESCPALSLRFYGSKKALAQAVIAKAKANRRQRFFFHGQFNTSLWLALLSGGIKPAQFYWHIWGADLYEVSHGLKFRLFYPLRRIAQGRVGCVFATRGDLSYFARQHPDVRGELLYFPTRMDPSLNAMAKERQRAGKLTILVGNSGDRSNQHIAALRAVYQQFGDTVNVVVPMGYPANNQAYIDEVRQAGLALFSDENLQILSEKMEFDAYLALLRQCDLGYFIFARQQGIGTLCLLIQADIPCVLNRDNPFWQDMAEQHLPVLFTTDDLNEQVVREAQRQLASVDKSGITFFSPNYLQPWHNALRIAAGEAE

SEQ ID NO: 1968 - protein, 800 aa, Bacillus anthracis
MTRNKFIPNKFSIISFSVLLFAISSSQAIEVNAMNEHYTESDIKRNHKTEKNKTEKEKFKDSINNLVKTEFTNETLDKIQQTQDLLKKIPKDVLEIYSELGGEIYFTDIDLVEHKELQDLSEEEKNSMNSRGEKVPFASRFVFEKKRETPKLIINIKDYAINSEQSKEVYYEIGKGISLDIISKDKSLDPEFLNLIKSLSDDSDSSDLLFSQKFKEKLELNNKSIDINFIKENLTEFQHAFSLAFSYYFAPDHRTVLELYAPDMFEYMNKLEKGGFEKISESLKKEGVEKDRIDVLKGEKALKASGLVPEHADAFKKIARELNTYILFRPVNKLATNLIKSGVATKGLNVHGKSSDWGPVAGYIPFDQDLSKKHGQQLAVEKGNLENKKSITEHEGEIGKIPLKLDHLRIEELKENGIILKGKKEIDNGKKYYLLESNNQVYEFRISDENNEVQYKTKEGKITVLGEKFNWRNIEVMAKNVEGVLKPLTADYDLFALAPSLTEIKKQIPQKEWDKVVNTPNSLEKQKGVTNLLIKYGIERKPDSTKGTLSNWQKQMLDRLNEAVKYTGYTGGDVVNHGTEQDNEEFPEKDNEIFIINPEGEFILTKNWEMTGRFIEKNITGKDYLYYFNRSYNKIAPGNKAYIEWTDPITKAKINTIPTSAEFIKNLSSIRRSSNVGVYKDSGDKDEFAKKESVKKIAGYLSDYYNSANHIFSQEKKRKISIFRGIQAYNEIENVLKSKQIAPEYKNYFQYLKERITNQVQLLLTHQKSNIEFKLLYKQLNFTENETDNFEVFQKIIDEK

SEQ ID NO: 1969 - protein, 506 aa, Streptococcus agalactiae
MVVYNLNRGIGWASSGVEYAQAYRSEVFRKLGVEAKFIFTDMFQNENIEHLTRNIGFEDNEIIWLYTFFTDLTIAATSYSLQQLKESFSLPIDRTEKNGKIISFFFKGSSIVVTVMLNDESSNIVQRVEYLMGGKLVRKDYYSYTKMFSEYYAPEDIGPCLYQRTFYNEDGSVAYEENVDGENSIFKFKETILYSKEELVGYMLEKLQLTNSDLILLDRSTGIGQAVLRNKGNAKVAVVVHAEHYNVSATDETTILWNNYYDYQFSNADSIDAFITSTETQTKTLIDQFKKYLNIEPVVYTIPVGSLSKLQRKEWHERKAFSLLTCSRLASEKHIDWLINAVVEANKVIPELTFDIYGEGGERQKLQEIIAKNKANNYIRLMGHKNLSSVYKDYQVYLSGSTSEGFGLTLMEAIGSGLPIIGLDVPYGNQTFIENNLNGYLIPRETPDNPQQISTAFAQYIVALFNSKDICKKHEYSYRIASRFLNDKIIENWSFFLRRLLNDYTI

SEQ ID NO: 1970 - protein, 568 aa, Acinetobacter baylyi
MAGSPRVYNSQHCGFSVAVMRFLLLLLTAVLISLAWLSPDHSYPWLTFASEMLSFAAFLSLLALFLNRPLELPRVQLLALPVVFIPMIQWGFGLVVDFSSALLSSAYLLGFWLTMLLGYNLSRSSADRERMFTLSSYLLFAVALLTSLIACIQWLNLESHVPGVMNLYSHRPYANFAQPNNMSTFLILGLLGCLYLAEKQKLKQYYIWPVAALIVFAITLSQSRTAWVFGLFFIIYWTYKSWRYPTHLKRYAVLLWAIGFFAVGLLFPRFTRLIQKLKEGNVVQTSSVVERASAGHERLGIWQQMLDAIHQKPWTGYGWNQTSIAELSSMSSNTIHVWFTSAHNVVLDLLVWNGWLLGGLITICILIWICWLNVHAKTTESIIACLMVSAVWIHTLLEYPLQYAYFLLPVGFLMGLIQAQTPDQTARSVPVSVIRSIWVIGIMLLALIWRDYNLYKVNSLRILKNQPANIEIWGSSKILVLTEFDQRLYWLKLSPVAPLTSTELDQIEKMVQNKATPYNLQKYAQLLLANHQFEKAQQQIAYLNRLHKKDYTLQDLQQANASAVESSK

SEQ ID NO: 1971 - protein, 372 aa, Vibrio cholerae
MKKKALITGVTGQDGSYLAEFLLAKGYEVHGIKRRASSFNTQRVDHIYQDPHVDNASFILHYGDLTDSSNLTRILQEVKPDEVYNLGAQSHVAVSFESPEYTADVDAMGTLRLLEAIRLLGLEKTTKFYQASTSELYGLVQETPQKETTPFYPRSPYAVAKMYAYWIVVNYRESYGMYACNGILFNHESPRRGETFVTRKITRGLANIAQGLEKCLYMGNMDALRDWGHAKDYVRMQWMMLQQDQPEDFVIATGVQYSVRQFIEWSAKELGVTLTFEGQGVDEKGIVTAIEGDKAPALKVGDVVVQIDPRYFRPAEVETLLGDPSKAKQKLGWTPEITVQEMCAEMVMEDLKVAQRHALLKLHGHDVPVSVE

SEQ ID NO: 1972 - protein, 547 aa, Campylobacter rectus
MAKEIFFSDEARNRLYEGVRKLNDAVKVTMGPRGRNVLVQKSFGAPAITKDGVSVAKEIELKDALENMGAGLVKEVASKTNDEAGDGTTTATVLAHSIFKEGLRNITAGANPVEVKRGMDKQAAAIIAELKNLSRKVTDKKEIAQVATISANSDSAIGGLIADAMEKVGKDGVITVEEAKSIQDELNVVEGMQFDRGYLSPYFITNAEKMQVELQSPYILLFDKKITNLKDLLPVLEQIQKTGKPLLIIAEDIEGEALATLVVNKLRGVLNISAVKAPGFGDRRKAMLEDIAILTGGEVVSEELGRTLESATLSDLGQASSVIIDKDNTTIVNGAGEKSAIDARIIQIKAQIAETTSDYDKEKLQERLAKLSGGVAVIKVGAATETEMKEKKDRVDDALSATKAAVEEGIVIGGGAAFIKAGAKVDLNLSGDEAIGADIVRRALTAPLRQIAENAGFDAGVVANSVSVSKDDNYGFNAATGEYVDMFKAGIIDPVKVERIALQNAVSVASLLLTTEATISELKEDKPMPAMPDMSGMGGMGGMGGMM

SEQ ID NO: 1973 - protein, 450 aa, Escherichia coli; identical to SEQ ID NO: 1373

SEQ ID NO: 1974 - protein, 468 aa, Salmonella typhimurium
MSKQQIGVVGMAVMGRNLALNIESRGYTVSVFNRSREKTEEVIAENPGKKLVPYYTVKEFVESLETPRRILLMVKAGAGTDAAIDSLKPYLEKGDIIIDGGNTFFQDTIRRNRELSAEGFNFIGTGVSGGEEGALKGPSIMPGGQKDAYELVAPILTKIAAVAEDGEPCVTYIGADGAGHYVKMVHNGIEYGDMQLIAEAYSLLKGGLNLSNEELANTFTEWNNGELSSYLIDITKDIFTKKDEDGNYLVDVILDEAANKGTGKWTSQSALDLGEPLSLITESVFARYISSLKAQRVAASKVLSGPKAQPAGDKAEFIEKVRRALYLGKIVSYAQGFSQLRAASDEYHWDLNYGEIAKIFRAGCIIRAQFLQKITDAYAENADIANLLLAPYFKKIADEYQQALRDVVAYAVQNGIPVPTFSAAVAYYDSYRAAVLPANLIQAQRDYFGAHTYKRTDKEGIFHTEWLE

SEQ ID NO: 1975 - protein, 364 aa, Borrelia hermsii
MRKRISAIINKLNISIMMMIVVLMIGCGQQPEAGKTGAAGGEKQGAGSLSEVLMEVGKSAENAFYSFLELVSDTLGFTAKSTTKKEDVGGYFNSLGGKLGEASNELEQVAKNSEAGIEKNDASKNPIRSAVNAAKKTLEALKGYLDSLGTVGDSNPVGWASNNAQGAAVDEAELKKAYKALKGIMDTAEGAGVARPEVGNIAVKVGNGTDNKDGAKILATDGAAAVGDAGKAAAILTTVSGKEMLASIVNSTEDKAVKITGNVTVETTPLEFAVGGNGAHLSQNANSKAAAVAGGIALRSLVKGGKLAADNNDDDKASQGVGITAANKLLVAVEDIIKKTVKNVLEKAKGEIDKARDPKPAGQQ

SEQ ID NO: 1976 - protein, 456 aa, Salmonella montevideo
MNNLTCFKAYDIRGRLGEELNEDIAWRIGRAYGEYLKPKTIVLGGDVRLTSEALKLALAKGLQDAGVDVLDIGMSGTEEIYFATFHLGVDGGIEVTASHNPMDYNGMKLVREGARPISGDTGLRDVQRLAEAGDFPPVNDAARGSYRQISLRDAYIDHLLAYISVNNLTPLKLVVNSGNGAAGPVIDAIEARLKALGAPVEFIKIHNTPDGTFPNGIPNPLLPECRDDTRKAVIEHGADMGIAFDGDFDRCFLFDEKGQFIEGYYIVGLLAEAFLEKHPGAKIIHDPRLTWNTEAVVTAAGGTPVMSKTGHAFIKERMRTEDAIYGGEMSAHHYFRDFAYCDSGMIPWLLVAELVCLKGQSLGELVRDRMAAFPASGEINSRLAEPAAAIARVEAHFAEEAQAVDRTDGLSMSFADWRFNLRSSNTEPVVRLNVESRGDIPLMEARTKEILQLLNS

SEQ ID NO: 1977 - protein, 159 aa, Mycobacterium bovis; identical to SEQ ID NO: 1354

SEQ ID NO: 1978 - protein, 1296 aa, Enterococcus faecalis
MKQQTEVKKRFKMYKAKKHWVVAPILFIGVLGVVGLATDDVQAAELDTQPGTTTVQPDNPDPQVGSTTPKTAVTEEATVQKDTTSQPTKVEEVASEKNGAEQSSATPNDTTNAQQPTVGAEKSAQEQPVVSPETTNEPLGQPTEVAPAENEANKSTSIPKEFETPDVDKAVDEAKKDPNITVVEKPAEDLGNVSSKDLAAKEKEVDQLQKEQAKKIAQQAAELKAKNEKIAKENAEIAAKNKAEKERYEKEVAEYNKHKNENGYVAKPVNKTLIFDREATKNSKVVSVKAAEYIDAKKLTDKHKDKKLLISMLSVDSSGLTTKDSKKAHFYYNNGAGGTLVVLHKNQPVTITYGNLNASYLGKKIASAEFQYTVKATPDSKGRLNAFLHDDPVATIVYGINIDPRTKKAGAEIEMLVRFFGEDGKEILPTKENPFVFSGASLNSRGENITYEFVKVGNTDTVHEINGSKVARHGNKVYSKTDIDVGTNGISISDWEAVQGKEYIGATVISTPNRIKFTFGNEIVNNPGYDGNSMWFAFNTDLKAKSITPYQEKGRPKQPEKATIEFNRYKANVVPVLVPNKEVTDGQKNINDLNVKRGDSLQYIVTGDTTELAKVDPKTVTKQGIRDTFDAEKVTIDLSKVKVYQADASLNEKDLKAVAAAINSGKAKDVTASYDLHLDQNTVTAMMKTNADDSVVLAMGYKYLLVLPFVVKNVEGDFENTAVQLTNDGETVTNTVINHVPGSNPSKDVKADKNGTVGSVSLHDKDIPLQTKIYYEVKSSERPANYGGITEEWGMNDVLDTTHDRFTGKWHAITNYDLKVGDKTLKAGTDISAYILLENKDNKDLTFTMNQALLAALNEGSNKVGKQAWSVYLEVERIKTGDVENTQTENYNKELVRSNTVVTHTPDDPKPTKAVHNKKGEDINHGKVARGDVLSYEMTWDLKGYDKDFAFDTVDLATGVSFFDDYDETKVTPIKDLLRVKDSKGEDITNQFTISWDDAKGTVTISAKDPQAFILAHGGQELRVTLPTKVKANVSGDVYNLAEQNTFGQRIKTNTVVNHIPKVNPKKDVVIKVGDKQSQNGATIKLGEKFFYEFTSSDIPAEYAGIVEEWSISDKLDVKHDKFSGQWSVFANSTFVLADGTKVNKGDDISKLFTMTFEQGVVKITASQAFLDAMNLKENKNVAHSWKAFIGVERIAAGDVYNTIEESFNNEKIKTNTVVTHTPEKPQTPPEKTVIVPPTPKTPQAPVEPLVVEKASVVPELPQTGEKQNVLLTVAGSLAAMLGLAGLGFKRRKETK

SEQ ID NO: 1979 - protein, 220 aa, Mycobacterium tuberculosis
MINVQAKPAAAASLAAIAIAFLAGCSSTKPVSQDTSPKPATSPAAPVTTAAMADPAADLIGRGCAQYAAQNPTGPGSVAGMAQDPVATAASNNPMLSTLTSALSGKLNPDVNLVDTLNGGEYTVFAPTNAAFDKLPAATIDQLKTDAKLLSSILTYHVIAGQASPSRIDGTHQTLQGADLTVIGARDDLMVNNAGLVCGGVHTANATVYMIDTVLMPPAQ

SEQ ID NO: 1980 - protein, 355 aa, Escherichia coli
MRKILITGGAGFIGSALVRYIINETSDAVVVVDKLTYAGNLMSLAPVAQSERFAFEKVDICDRAELARVFTEHQPDCVMHLAAESHVDRSIDGPAAFIETNIVGTYTLLEAARAYWNALTEDKKSAFRFHHISTDEVYGDLHSTDDFFTETTPYAPSSPYSASKASSDHLVRAWLRTYGLPTLITNCSNNYGPYHFPEKLIPLMILNALAGKSLPVYGNGQQIRDWLYVEDHARALYCVATTGKVGETYNIGGHNERKNLDVVETICELLEELAPNKPHGVAHYRDLITFVADRPGHDLRYAIDASKIARELGWLPQETFESGMRKTVQWYLANESWWKQVQDGSYQGERLGLKG

SEQ ID NO: 1981 - protein, 359 aa, Escherichia coli; identical to SEQ ID NO: 1303

SEQ ID NO: 1982 - protein, 546 aa, Staphylococcus epidermidis
MKNNWIDVLDESLVKDFYNNQTSEEQQEGLNTTLSFGTAGIRGKFGLGEGRLNKFTVSKVALGFAHYLTSSIAHPVVVIHYDTRHLSPEFAQIIANILASHDIKVYLADTYRTTPDLSFAVRYLQADAGVMITASHNPKDYNGIKVYGEDGAQLSTDASAQLSTYIDKLGHPLHINVPSLTTEQQSLIHSVPSEVREDYFKNVQDLVGTIPQSDLKVVFTSLHGTSVPIVPDILSSLNFNQFELVASQCEPDSDFSSVASANPEDHKAFDQSIELANLIDADLLIGTDPDADRLGIVERDAEGNIYYYNGNQIGALLLNYRIKQTEGLPNRIMFQSIVSGGLAKSLAQYHNVNFKEVLTGFKYIAAEIRHLSPEQNFIFGYEESYGFLARPFVRDKDAIQIVPLMIKYAAELKNEGRMLKDELEDITRNVGNFNDKLFSHTFEGTQGKAKIENIMTQFRSETPTEMCGLKVIAIEDFETGKKTDLQNDEVSDITLPKANVIKIYFNEGFIALRPSGTEPKIKLYVSLSCDHFDVIAQKINDAIFNS

SEQ ID NO: 1983 - protein, 249 aa, Pectobacterium carotovorum
MTALKTTETIPLYTIRDLPIHGFRNMAQFVDYLFAGERVETGTLVAINAEKVLTAEKDVALRTLLDRAEYKYADGISIVRSIRRKYPQADVTRIAGADLWEALMERAGKEGTPVFLVGGKPDVLAQTEAKLRAQWNVNIVGSQDGYFAPEQRDALFERIRASGAQFVTVAMGSPRQEILMRDCRHHYPDALYMGVGGTYDVFTGHVKRAPLVWQNLGLEWLYRLLSQPSRIFRQFKLLKYVAYHYSGRL

SEQ ID NO: 1984 - protein, 325 aa, Helicobacter pylori
MPTIDFTFCEINPKKGFGGANGNKISLFYNNELYMVKFPPKPSTHKEMSYTNGCFSEYVACHIVNSLGLKVQETLLGTYKNKIVVACKDFTTHQYELVDFLSLKNTMIELEKSGKDTNLNDVLYAIDNQHFIEPKVLKCFFWDMFVADTLLGNFDRHNGNWGFLRASNSKEYQIAPIFDCGSCLYPQADDVVCQKVLSNIDELNARIYNFPQSILKDDNDKKINYYDFLTQTNNKDCLDALLRIYPRIDMNKIHSIIDNTPFMSEIHKEFLHTMLDERKSKIIDVAHTRAIELSLQHKQAHSNPYDNADDLDNSNEYTPTPKRRR

SEQ ID NO: 1985 - protein, 288 aa, Staphylococcus haemolyticus
MKQIKKAIIPAAGLGTRFLPATKAMPKEMLPILDKPTIQYIVEEASRAGIEDIIIVTGKHKRAIEDHFDNQKELEMVLEEKGKDDLLEKVQYSTDLANIFYVRQKEQKGLGHAIHTARQFIGNEPFAVLLGDDIVESETPAIKQLMNVYEETGHSVIGVQEVPESVTHRYGIIDPLEKEGRRYEVKQFVEKPKQGTAPSNLAIMGRYILTPEIFDYLETQKEGAGNEIQLTDAIERMNSDIPVYAYDFDGDRYDVGEKLGFVKTTIEYALKDPKMKDELIKFIKELGF

SEQ ID NO: 1986 - protein, 520 aa, Mycobacterium tuberculosis
MSASPLLGMSRREFLTKLTGAGAAAFLMDWAAPVIEKAYGAGPCPGHLTDIEHIVLLMQENRSFDHYFGTLSSTNGFNAASPAFQQMGWNPMTQALDPAGVTIPFRLDTTRGPFLDGECVNDPEHQWVGMHLAWNGGANDNWLPAQATTRAGPYVPLTMGYYTRQDIPIHYLLADTFTICDGYHCSLLTGTLPNRLYWLSANIDPAGTDGGPQLVEPGFLPLQQFSWRIMPENLEDAGVSWKVYQNKGLGRFINTPISNNGLVQAFRQAADPRSNLARYGIAPTYPGDFAADVRANRLPKVSWLVPNILQSEHPALPVALGAVSMVTALRILLSNPAVWEKTALIVSYDENGGFFDHVTPPTAPPGTPGEFVTVPNIDAVPGSGGIRGPLGLGFRVPCIVISPYSRGPLMVSDTFDHTSQLKLIRARFGVPVPNMTAWRDGVVGDMTSAFNFATPPNSTRPNLSHPLLGALPKLPQCIPNVVLGTTDGALPSIPYRVPYPQVMPTQETTPVRGTPSGLCS

SEQ ID NO: 1987 - protein, 328 aa, Vibrio cholerae
MCTGDRKMPKSILLTGSTGFVGTNLVKSLTLKSDYIVKSAVRHAVNKDDGLLFEVGDINASTDFELPLKNTTVVVHCAARAHVMDDKEAEPLTLYREVNTAGTVNLAKQAIDSGVKRFIFISSIKVNGEGTLVGCPFKTEDNHAPEDDYGLSKSEAEKQLVALAKDSSMEVVIIRPTIVYGPGVKANFASLMRLVSKGIPLPFGSITQNKRSLVSINNLVDLIVTCIDHPKAANQVFLVSDGHDVSTAEMVRELAIALDKPTWQLPVPIWCYKLFGKLFGKSDIVDRLTGTLQVDISHTKETLGWKPPQTLQEGFKQTAQAFLQANNR

SEQ ID NO: 1988 - protein, 552 aa, Coxiella burnetii
MAAKVLKFSHEVLHAMSRGVEVLANAVKVTLGPKGRNVVLDKSFGAPTITKDGVSVAKEIELEDKFENMGAQMVKEVASRTSDDAGDGTTTATVLAQAILVEGIKAVIAGMNPMDLKRGIDKAVTAAVAELKKISKPCKDQKAIAQVGTISANSDKSIGDIIAEAMEKVGKEGVITVEDGSGLENALEVVEGMQFDRGYLSPYFINNQQNMSAELENPFILLVDKKISNIRELIPLLENVAKSGRPLLVIAEDIEGEALATLVVNNIRGVVKVAAVKAPGFGDRRKAMLQDIAVLTGGKVISEEVGLSLEAASLDDLGSAKRVVVTKDDTTIIDGSGDAGDIKNRVEQIRKEIENSSSDYDKEKLQERLAKLAGGVAVIKVGAATEVEMKEKKARVEDALHATRAAVEEGVVPGGGVALIRVLKSLDSVEVENEDQRVGVEIARRAMAYPLSQIVKNTGVQAAVVADKVLNHKDVNYGYNAATGEYGDMIEMGILDPTKVTRTALQNAASIAGLMITTECMVTEAPKKKEESMPGGGDMGGMGGMGGMGGMM

SEQ ID NO: 1989 - protein, 450 aa, Escherichia coli; identical to SEQ ID NO: 1473

SEQ ID NO: 1990 - protein, 338 aa, Mycobacterium tuberculosis; identical to SEQ ID NO: 1402

SEQ ID NO: 1991 - protein, 205 aa, Borrelia hermsii
MRKRISAIIMTLFMVFMSCNNGGPELKSDEVAKSDGTVLDLAKVSKKIKEVSAFAASVKEVHTLIKSIGDLAKAIGKKIKTDETGTLESSTADQNEQLVAGAFQVVSTVKGELESLVQVDGISDDLKAKVNEAKNANDGLLSKFKSSAKDNESVKKDEEAKKVIDRTNASATELKKLDTAVDELLKAANEAVSAAIAELTAPAKS

SEQ ID NO: 1992 - protein, 482 aa, Escherichia coli
MSDAPIIAVVMAGGTGSRLWPLSRELYPKQFLQLSGDNTLLQTTLLRLSGLSCQKPLVITNEQHRFVVAEQLREINKLNGNIILEPCGRNTAPAIAISAFHALKRNPQEDPLLLVLAADHVIAKESVFCDAIKNATPIANQGKIVTFGIIPEYAETGYGYIERGELSVPLQGHENTGFYYVNKFVEKPNRETAELYMTSGNHYWNSGIFMFKASVYLEELRKFRPDIYNVCEQVASSSYIDLDFIRLSKEQFQDCPAESIDFAVMEKTEKCVVCPVDIGWSDVGSWQSLWDISLKSKTGDVCKGDILTYDTKNNYIYSESALVAAIGIEDMVIVQTKDAVLVSKKSDVQHVKKIVEMLKLQQRTEYISHREVFRPWGKFDSIDQGERYKVKKIIVKPGEGLSLRMHHHRSEHWIVLSGTAKVTLGDKTKLVTANESIYIPLGAAYSLENPGIIPLNLIEVSSGDYLGEDDIIRQKERYKHED

SEQ ID NO: 1993 - protein, 162 aa, Mycobacterium intracellulare
MKRQLTVAVAGAAILAAGISGCSGGNKSGTSASSSANSSGTTRRLAPGAAGTKVTIDGKDQNVSGSVVCTNAGGTINIAIGGAATGIAAVLSDGNPPQVKSVGLGNVNGVTLGYTSGTGQGNATASKDGNSYKISGTATGVDMANPMQPVNKPFEINVTCNS

SEQ ID NO: 1994 - protein, 265 aa, Escherichia coli
MDFKYTEEKEMIKINNIMIHKYTVLYTSNCIMDIYSEEEKITCFSNRLVFLERGVNISVRIQKKILSERPYVAFRLNGDILRHLKNALMIIYGMSKVDTNDCRGMSRKIMTTEVNKTLLDELKNINSHDDSAFISSLIYLISKIENNEKIIESIYISSVSFFSDKVRNVIEKDLSRKWTLGIIADAFNVSEITIRKRLESENTNFNQILMQLRMSKAALLLLENSYQISQISNMIGISSASYFIRVFNKHYGVTPKQFFTYFKGG

SEQ ID NO: 1995 - protein, 193 aa, Mycobacterium bovis; identical to SEQ ID NO: 1771

SEQ ID NO: 1996 - protein, 294 aa, Aggregatibacter actinomycetemcomitans
MARLLITGAGGQLGRSLAKLLVDNGRYEVLALDFSELDITNKDMVFSIIDSFKPNVIINAAAYTSVDQAELEVSSAYSVNVRGVQYLAEAAIRHNSAILHVSTDYVFDGYKSGKYKETDIIHPLCVYGKSKAEGERLLLTLSPKSIILRTSWTFGEYGNNFVKTMLRLAKNRDILGVVADQIGGPTYSGDIASVLIQIAEKIIVGETVKYGIYHFTGEPCVSWYDFAIAIFDEAVAQKVLENVPLVNAITTADYPTLAKRPANSCLDLTKIQQAFGIQPSDWQRALKNIRAYAE

SEQ ID NO: 1997 - protein, 246 aa, Salmonella paratyphi; identical to SEQ ID NO: 1277

SEQ ID NO: 1998 - protein, 552 aa, Staphylococcus saprophyticus
MKALWLENINESLVKDFYETQTEEEQNAGFEGVLSFGTAGIRSTFGLGPARLNAFTVRKVALGLAQYLNHNVDDASVVIHFDTRFLSKAFSQEMASVLANNGITAIISDNYKSTPELSFAVRHLQVNAGIMITASHNPKNYNGIKIYNEKGGQLLPEASEQLSEYINSIETPLNIEKGDFNAFVENGKIKYMSNEVTESYKKEVKSLVGSIDAHDAKVILTSLHGTSLPLVSDILTELDYHNFVIEKEQSEPNGNFPTVAIANPEDEAAFTLGKQLADKTDAQLIIATDPDADRLGFIERYGDNDFRYFNGNEIGLLLMKLRFQDLTEDSTPQYMIKSIVTSELAERLATSLNVEVNDVLTGFKFISDLIEHKQKDDDKQLLLAFEESHGYLAQPISRDKDAIQMVPLLVKYKNLLDKNGITFKETIEDIYENIGYFKDRTLAPTFEGKAGVKKIESIMSQFRNEQVFSICGMDVLKIEDYHVGEVRDMITGHTEKLTLPKTNLIRFIFENGFIALRPSGTEPKIKLYFSLEVENIDEITQQFEANYINNIV

SEQ ID NO: 1999 - protein, 359 aa, Salmonella schwarzengrund
MTVLIHVLGSDIPHHNHTVLRFFNDTLAATSEHAREFMVAGEDNGFTESCPALSLRFYGSKKALAQAVIAKAKANRRQRFFFHGQFNTSLWLALLSGGIKPAQFYWHIWGADLYEVSHGLKFRLFYPLRRIAQGRVGGVFATRGDLSYFARQHPGVRGELLYFPTRMDPSLNSMAKERQRAGKLTILVGNSGDRSNEHITALRAVYQQFGDTVNVVVPMGYPANNQAYIDEVRQVGLALFSAENLQILSEKMEFDAYLALLRQCDLGYFIFARQQGIGTLCLLIQADIPCVLNRDNPFWQDMAEQHLPVLFTTDDLNEQVVREAQRQLASVDKSGITFFSPNYLQPWHNALRIAAGEAE

SEQ ID NO: 2000 - protein, 905 aa, Mycobacterium tuberculosis
MSASVSATTAHHGLPAHEVVLLLESDPYHGLSDGEAAQRLERFGPNTLAVVTRASLLARILRQFHHPLIYVLLVAGTITAGLKEFVDAAVIFGVVVINAIVGFIQESKAEAALQGLRSMVHTHAKVVREGHEHTMPSEELVPGDLVLLAAGDKVPADLRLVRQTGLSVNESALTGESTPVHKDEVALPEGTPVADRRNIAYSGTLVTAGHGAGIVVATGAETELGEIHRLVGAAEVVATPLTAKLAWFSKFLTIAILGLAALTFGVGLLRRQDAVETFTAAIALAVGAIPEGLPTAVTITLAIGMARMAKRRAVIRRLPAVETLGSTTVICADKTGTLTENQMTVQSIWTPHGEIRATGTGYAPDVLLCDTDDAPVPVNANAALRWSLLAGACSNDAALVRDGTRWQIVGDPTEGAMLVVAAKAGFNPERLATTLPQVAAIPFSSERQYMATLHRDGTDHVVLAKGAVERMLDLCGTEMGADGALRPLDRATVLRATEMLTSRGLRVLATGMGAGAGTPDDFDENVIPGSLALTGLQAMSDPPRAAAASAVAACHSAGIAVKMITGDHAGTATAIATEVGLLDNTEPAAGSVLTGAELAALSADQYPEAVDTASVFARVSPEQKLRLVQALQARGHVVAMTGDGVNDAPALRQANIGVAMGRGGTEVAKDAADMVLTDDDFATIEAAVEEGRGVFDNLTKFITWTLPTNLGEGLVILAAIAVGVALPILPTQILWINMTTAIALGLMLAFEPKEAGIMTRPPRDPDQPLLTGWLVRRTLLVSTLLVASAWWLFAWELDNGAGLHEARTAALNLFVVVEAFYLFSCRSLTRSAWRLGMFANRWIILGVSAQAIAQFAITYLPAMNMVFDTAPIDIGVWVRIFAVATAITIVVATDTLLPRIRAQPP

SEQ ID NO: 2001 - protein, 427 aa, Coxiella burnetii
MTELTGVSIVTYQHIKVPSQGEKITVNKAVLEVPDRPIIPFIEGDGIGIDIAPVMKNVVDAAVEKSYAGKRKIEWMEIYAGEKATKVYGKDNWLPDETLEAIKEYQVAIKGPLTTPVGGGIRSLNVALRQQLDLYVCLRPVRYFTGVPSPVKTPEKVNMVIFRENSEDIYAGIEWPAGSPEAVKLINFLQNEMGVKKIRFPETAGIGIKPVSKEGTSRLVRRAIQYAIDNDRDSVTLVHKGNIMKFTEGAFKDWGYEVAVKEFGAKPLDGGPWHVFENPKTGQKITIKDVIADAFLQQILLRPAEYSVIATLNLNGDYISDALAAEVGGIGIAPGANLSDTVGLFEATHGTAPKYAGQDKVNPGSLILSAEMMLRYLGWKEAADLVVQGIEGAIESKTVTYDFARLMTGAKEVSTSQFGKAIIKHIL

SEQ ID NO: 2002 - protein, 340 aa, Streptococcus pyogenes
MKLRHLLLTGAALTSFAATTVHGETVVNGAKLTVTKNLDLVNSNALIPNTDFTFKIEPDTTVNEDGNKFKGVALNTPMTKVTYTNSDKGGSNTKTAEFDFSEVTFEKPGVYYYKVTEEKIDKVPGVSYDTTSYTVQVHVLWNEEQQKPVATYIVGYKEGSKVPIQFKNSLDSTTLTVKKKVSGTGGDRSKDFNFGLTLKANQYYKASEKVMIEKTTKGGQAPVQTEASIDQLYHFTLKDGESIKVTNLPVGVDYVVTEDDYKSEKYTTNVEVSPQDGAVKNIAGNSTEQETSTDKDMTITFTNKKDFEVPTGVAMTVAPYIALGIVAVGGALYFVKKKNA

SEQ ID NO: 2003 - protein, 336 aa, Yersinia enterocolitica
MSILITGGAGYIGSHTVLTLLEQGRNVVVLDNLINSSAESLARVSKICGRKPNFYHGDILDRSCLKLIFSSHKIDSVIHFAGLKSVGESVEKPIEYYQNNVVGSITLLEEMCLANVKKLIFSSSATVYGEPEFVPLTEKARIGGTTNPYGTSKVMVEQILKDFSLAHPDYSITALRYFNPVGAHPSGLIGEDPNGKPNNLLPFITQVAIGKLSKLLVYGNDYDTPDGSGIRDYIHVMDLAEGHLSTLINLTSGFRIYNLGTGVGYSVLHMIKEFERITGKNIPFDIVSRRPGDIAECWASPELAHLELGWYAKRTLVDMLQDAWKWQKMNPNGYNC

SEQ ID NO: 2004 - protein, 544 aa, Bartonella bacilliformis
MAAKEVKFGRDARERLLRGVDILADAVKVTLGPKGRNVVIDKSFGAPRITKDGVSVAKEIELENKFENMGAQMLREVASKTNDIAGDGTTTATVLGQAIVQEGVKAVAASMNPMDLKRGIDAAVEAVVADLFKKAKKIQTSEEIAQVATISANGAEDIGKMIADAMEKVGNEGVITVEEAKTAETELEVVEGMQFDRGYLSPYFVTNSEKMMVDLDDPYILIHEKKLSNLQSLLPVLEAVAQSGKPLLIIAEDVEGEALATLVVNKLRGGLKIAAVKAPGFGDRRKAMLEDIAVLTSGQVISEDVGIKLENVTLEMLGRAKKVHVSKETTTIVDGAGQKSEINARVSQIKAQIEETTSDYDREKLQERLAKLAGGVAVIRVGGSTEVEVKEKKDRVDDALNATRAAVEEGIVPGGGTPLLRAAKALSIKGKNPDQEAGIGIIRRALQAPARQIAHNAGEEAAVIVGKVLENCSDTFGYNTATAQFRDLISFGIVDPVKVVRSALQNAASIASLLITTEAMVAEVPKKEAAAPAMPGGGMGGMDF

SEQ ID NO: 2005 - protein, 454 aa, Yersinia pseudotuberculosis; identical to SEQ ID NO: 1357

SEQ ID NO: 2006 - protein, 330 aa, Mycobacterium avium
MTDLSEKVRAWGRRLLVGAAAAVTLPGLIGLAGGAATANAFSRPGLPVEYLQVPSAGMGRDIKVQFQSGGNGSPAVYLLDGLRAQDDYNGWDINTPAFEWYYQSGLSVIMPVGGQSSFYADWYQPACGKAGCSTYKWETFLTSELPSYLASNKGVKRTGNAAVGISMSGSSAMILAVNHPDQFIYAGSLSALLDPSQGMGPSLIGLAMGDAGGYKADAMWGPSSDPAWQRNDPSLHIPELVGHNTRLWLYCGNGTPSELGGANMPAEFLENFVRSSNLKFQDAYNGAGGHNAVFNFNANGTHSWEYWGAQLNAMKPDLQGTLGASPGGGG

SEQ ID NO: 2007 - protein, 217 aa, Borrelia hermsii
MRKRISAIIMTLFMVFMSCNNGGPELKSDEVAKSDGTVLDLAKVSKKIKEASAFAASVKEVETLVKSVDELAKAIGKKIKNDGTLEFADADKDKNGSLIAGAFQIILIAEGKLKGLDKEAGISEALKAKVTDAEAKSKAFLAKVKGQTATLGKNDASDDDTKKAIKKDNSDKTKGASELEALNTAVDALLKAAEGEVEAAIKELTAPVKAEKPSQNN

SEQ ID NO: 2008 - protein, 471 aa, Escherichia coli
MLLPVIMAGGTGSRLWPMSRELYPKQFLRLFGQNSMLQETITRLSGLEVHEPMVICNEEHRFLVAEQLRQLNKLSSNIILEPVGRNTAPAIALAALQATRHGDDPLMLVLAADHIINNQPVFHDAIRVAEQYADEGHLVTFGIVPNAPETGYGYIQRGVAVTDSAHTPYQVARFVEKPDRERAGAYLASGEYYWNSGMFMFRAKKYLSELAKFRPDILEACQAAVNAADNGSDFISIPHDIFCECPDESVDYAVMEKTADAVVVGLDADWSDVGSWSALWEVSPKDGQGNVLSGDAWVHNSENCYINSDEKLVAAIGVENLVIVSTKDAVLVMNRERSQDVKKAVEFLKQNQRTEYKRHREIYRPWGRCDVVVQTPRFNVNRITVKPGGAFSMQMHHHRAEHWVILAGTGQVTVNGKQFLLSENQSTFIPIGAEHCLENPGCIPLEVLEIQSGSYLGEDDIIRIKDQYGRC

SEQ ID NO: 2009 - protein, 233 aa, Mycobacterium tuberculosis; identical to SEQ ID NO: 1769

SEQ ID NO: 2010 - protein, 100 aa, Mycobacterium tuberculosis; identical to SEQ ID NO: 1450

SEQ ID NO: 2011 - protein, 66 aa, Mycobacterium avium
MTVVRGVSALLRVFCIAMLAAGLGVALQPAAVTGAARAAGYESLMVPSAAMGRDIPVAFLAGGPHA

SEQ ID NO: 2012 - protein, 538 aa, Rhizobium meliloti
MKWLKGIGLALIPFNLHDYPIALTLGCYLLSCAVIFYTDRFALPARERRKNAPKYGRNRDRIDRLARLPVIALVFAGFFAISWRPLYAAAGTMSFFIIFTGISRAKFKFIREPLVFSDIALVADVFKYKTIFYASSLNIVFWIVAFLYVFGVSALYMYFEPTILPERSRLFWVLVMVGIAAGPWGLLFYGPVNRPTAALVQRLVKAINVKMNTVRFGTFASVVFHFIIWLGVKRDKIVAELSEILRAAVHDLIGHEEAPLIIVWQSESFIDMRHFGVDSIKLPTVDRLRKQAVQWGRLSNVFEGGYTLRTEFAVLSGLVPDDIHVDASYPYLRAAHYADIVWPGKLKRAGWRTHFIHPYDRTFFLRHKAMPLLGFEKLTMLDAFDHKPERDGLYVSDATLAARVLAEVEKLPEEESGFFFVASMANHGPWEPGRVGTLTNPVDIYLAILEQSDAALKQLIDGLNKLDRPVWFVFYGDHAPLLKSFADPFPDPRTDYFIVPLAKARAAAHSPKRAKDEDPWNLLGSMLKHANLHKDALQ

SEQ ID NO: 2013 - protein, 246 aa, Escherichia coli; identical to SEQ ID NO: 1265

SEQ ID NO: 2014 - protein, 520 aa, Mycobacterium tuberculosis; identical to SEQ ID NO: 1986

SEQ ID NO: 2015 - protein, 376 aa, Yersinia pestis
MKVLTVFGTRPEAIKMAPLVHALAQDDAFESRVCVTAQHREMLDQVLRLFEIQPDYDLDIMRPGQGLTEITCRILEGLKPVLEEFKPDVILVHGDTTTTLSASLAGFYHRIPVGHVEAGLRTGDLYSPWPEEANRQLTGHLAMYHFAPTENSRQNLLREWVPENRIFVTGNTVIDALFWVRDRVMNTPDLRANLAQRYAFLDTNKKMILVTGHRRESFGGGFERICSALAEIARKHPEVQVVYPVHLNPNVSEPVNRILKGIDNIILIDPQDYLPFVYLMNHAYLILTDSGGIQEEAPSLGKPVLVMRDTTERPEAVDSGTVLLVGTNINKIVDAVTRLLTDETAYHQMTRAHNPYGDGYACQRILKALKNHQVTL

SEQ ID NO: 2016 - protein, 505 aa, Salmonella enteritidis
MAQVINTNSLSLLTQNNLNKSQSSLSSAIERLSSGLRINSAKDDAAGQAIANRFTSNIKGLTQASRNANDGISIAQTTEGALNEINNNLQRVRELSVQATNGTNSDSDLKSIQDEIQQRLEEIDRVSNQTQFNGVKVLSQDNQMKIQVGANDGETITIDLQKIDVKSLGLDGFNVNGPKEATVGDLKSSFKNVTGYDTYAAGADKYRVDINSGAVVTDAAAPDKVYVNAANGQLTTDDAENNTAVDLFKTTKSTAGTAEAKAIAGAIKGGKEGDTFDYKGVTFTIDTKTGDDGNGKVSTTINGEKVTLTVADIATGATDVNAATLQSSKNVYTSVVNGQFTFDDKTKNESAKLSDLEANNAVKGESKITVNGAEYTANATGDKITLAGKTMFIDKTASGVSTLINEDAAAAKKSTANPLASIDSALSKVDAVRSSLGAIQNRFDSAITNLGNTVTNLNSARSRIEDADYATEVSNMSKAQILQQAGTSVLAQANQVPQNVLSLLR

SEQ ID NO: 2017 - protein, 1509 aa, Renibacterium salmoninarum
MPFRGRRRQSALRGLSLAATFCLAAGSSGISGALFATPAQADPLPTAAGLSINSANLTVEVSADFPQALSYTETSSAKHLSGARTLASSITINGTDQPVKVSSQKADAQTVNYLITPNNLAGVSLDAQLRVEGMTLTFKISKIKDTAENRVNNLQIKNQDLVTVSSQEPGATVASAVVSVDRAVSGDTITNLSSTTALDPTAKRSMLAIAATDQLAAGFETNSLYDSGNTIGPSDQGKFWRQALADGTGADGKPAVKMAVSSGAWLYRSAGSDQTEELPWSKVVISGDANADGKVDWQDGAIAYRSIESKPAGGDDVKNRVVTHIPFNFASQATHPFLRTLDDVKHIALATDGLGQMALEKGYTSEGHDSANSDFGGNFNERAGGLTDFNAMLSGGSAYGATFGVHINNTEAYPEANSFSNDFVDPTKKGWNWLDQSFYIDQQRDILSGSQQQRIDQLRSEAGPNLTMAYVDVYYESGWKSYRLQKGLKDAGFSVASEFATAMPANNTWSHWANDEKHGGSNNIKAGTQILRFVDNSQRDIWNPDPLLGTSHIVEWEGWTNQNDYNAFLKNIWGNNLPVKFLQQQQITSWKSRSVDLTGGLKVTGTSLADRVISQQGVPVLKGSNYLLPWSAAPVSFGSGAVNDTTQNKLYHYSADGGTSTWQLTPQFATASSLQIYKLTDYGRELIGSVPVVNGSVTLTAEANQAYVLVADASVTTVPADPSYGAGSKVKDPGFNSAGLKDWNATGGAAVERTAQGLLVAKLGQGSSAISQTLGSLDPGSYSIGAWVEIEPTTLTVTPAGGAPISVTVDQSGAENFVASDEKRGTYFQRLRVLVDIANAGAPQLSISAPAGEAAVRIDDVRVVKANKVPTTGILSENFENTDQGWLPFIKGDAGGQTDPRTHIAKLNAPYTQKGWNGKTTSDVLDDTYSLHSHEENQGLVYRTSNYTLPLQAGRQYRVSFDYQASLANQYTWVSGYDSGKNPVQTASTAIPVATDTTRWSQTLSAGSCGPAWVGLQRTGSSGGAEFSMDNLLVEDLGPSAETPACASLSLTSGQDVIEQGQTNTFSASFSSSEAQSIAGLSVALDLPAGWTASAATPATAATLPAGGSLETQWKVQVPADADGDYTIKAKASYQTTVDPIGSRSATTETAVYTLPKPPTKDTYASDMQWIGTPSNGWGPVEKDQANGEQAQGDGPPLKLGGVTYPKGLGAHAASSIRYYVGSQCSAFTAVIGIDDFQKLKGQAVFSVLGDGNSLYTSPVMKGGAAAQTITVPLNGAKYVDLKVAISGANNGNAWSDWANAKFLCSAPVAPITLQPTLSVPTDSLQPGSAFTVRVDQLKSGSTAKAELHSDPIDLGSVQANNDGVASFQVTLAQDAPLGNHQIVVTGTDKNGLAATGTVDAQIKAANPNPGTGSNPGTGSNPGTDPGTGSAGGNSSGGGANGSGANGTYVNGSGGSFGNGAGMDAKTGSNSASSLAETGFSGLVLPLGIGLMLLLIGAAAIIVRRHRHS

SEQ ID NO: 2018 - protein, 216 aa, Salmonella typhi
MNNMNIIIADDHPIVLFGIRKSLEQIEWVNVVGEFEDSTALINNLPKLDAHVLITDLSMPGDKYGDGITLIKYIKRHFPSLSIIVLTMNNNPAILSAVLDLDIEGIVLKQGAPTDLPKALAALQKGKKFTPESVSRLLEKISAGGYGDKRLSPKESEVLRLFAEGFLVTEIAKKLNRSIKTISSQKKSAMMKLGVENDIALLNYLSSVTLSPTDKE

SEQ ID NO: 2019 - protein, 367 aa, Vibrio cholerae
MIPVYEPSLDGNERKYLNDCIDSGWVSSRGKYIDRFETEFAEFLKVKHATTVSNGTVALHLAMSALGITQGDEVIVPTFTYVASVNTIVQCGALPVFAEIEGESLQVSVEDVKRKINKKTKAVMAVHIYGQACDIQSLRDLCDEHGLYLIEDCAEAIGTAVNGKKVGTFGDVSTFSFFGNKTITSGEGGMVVSNSDIIIDKCLRLKNQGVVAGKRYWHDLVAYNYRMTNLCAAIGVAQLERVDKIIKAKRDIAEIYRSELAGLPMQVHKESNGTFHSYWLTSIILDQEFEVHRDGLMTFLENNDIESRPFFYPAHTLPMYEHLAEKTAFPLSNSYSHRGINLPSWPGLCDDQVKEICNCIKNYFNCI

SEQ ID NO: 2020 - protein, 267 aa, Bordetella bronchiseptica
MIILIDSGNSRLKVGWFDPDAPQAAREPAPVAFDNLDLDALGRWLATLPRRPQRALGVNVAGLARGQAIAATLRAGGCDIRWLRAQPLAMGLRNGYRNPDQLGADRWACMVGVLARQPSVHPPLLVASFGTATTLDTIGPDNVFPGGLILPGPAMMRGALAHGTAHLPLADGLVADYPIDTHQAIASGIAAAQAGAIVRQWLAGRQRYGQAPEIYVAGGGWPEVRQEAERLLAVTGAAFGATPRPTYLDSPVLDGLAALAAHGAPTA

SEQ ID NO: 2021 - protein, 452 aa, Salmonella typhimurium
MSLMQFSGLLVVWLLSTLFIATLTWFEFRRVRFNFNVFFSLLFLLTFFFGFPLTSVLVFRFDVGVAPPEILLQALLSAACFYGVYYVTYKTRLRKRVVDVPRKPLFTMNRVETHLTWVILMGIALVSVAIFFMHNGFLLFRLHSYSQIFSSEVSGVALKRFFYFFIPAMLVVYFLRQDSKAWLFFLVSTVAFGLLTYMIVGGTRANIIIAFAIFLFIGIIRGWISLWMLAAAGVLGIVGMFWLALKRYGLNVSGDEAFYTFLYLTRDTFSPWENLALLLQNYHNIEFQGLAPIVRDFYVFIPTWLWPGRPSIVLNSANYFTWEVLNNHSGLAISPTLIGSLVVMGGALFIPLGAIVVGLIIKWFDWLYELGNREPNRYKAAILHSFCFGAIFNMIVLAREGLDSFVSRVVFFLVVFGASLLVAKLLFWLFDSAGLIHKRTTSLPQAQVEGKL

SEQ ID NO: 2022 - protein, 327 aa, Mycobacterium leprae
MIDVSGKIRAWGRWLLVGAAATLPSLISLAGGAATASAFSRPGLPVEYLQVPSEAMGRSIKVQFQNGGNGSPAVYLLDGLRAQDDYNGWDINTSAFEWYYQSGLSVVMPVGGQSSFYSDWYSPACGKAGCTTYKWETFLTSELPKWLSANRSVKSTGSAVVGLSMAGSSALILAAYHPDQFIYAGSLSALMDSSQGIEPQLIGLAMGDAGGYKAADMWGPPNDPAWQRNDPILQAGKLVANNTHLWVYCGNGTPSELGGTNVPAEFLENFVHGSNLKFQDAYNGAGGHNAVFNLNADGTHSWEYWGAQLNAMKPDLQNTLMAVPRSG

SEQ ID NO: 2023 - protein, 224 aa, Escherichia coli
MPVRASIEPLTWENAFFGVNSAIVRITSEAPLLTPDALAPWSRVQAKIAASNTGELDALQQLGFSLVEGEVDLALPVNNVSDSGAVVAQETDIPALRQLASAAFAQSRFRAPWYAPDASGRFYAQWIENAVRGTFDHQCLILRAASGDIRGYVSLRELNATDARIGLLAGRGAGAELMQTALNWAYARGKTTLRVATQMGNTAALKRYIQSGANVESTAYWLYR

SEQ ID NO: 2024 - protein, 382 aa, Escherichia coli
MLIKVKSAVSWMRARLSAISLADIQKHLAKIIILAPMAVLLIYLAIFSQPRYMSESKVAIKRSDDLNSGSLNFGLLLGASNPSSAEDALYLKEYINSPDMLAALDKQLNFREAFSHSGLDFLNHLSKDETAEGFLKYYKDRINVSYDDKTGLLNIQTQGFSPEFALKFNQTVLKESERFINEMSHRIARDQLAFAETEMEKARQRLDASKAELLSYQDNNNVLDPQAQAQAASTLVNTLMGQKIQMEADLRNLLTYLREDAPQVVSARNAIQSLQAQIDEEKSKITAPQGDKLNRMAVDFEEIKSKVEFNTELYKLTLTSIEKTRVEAARKLKVLSVISSPQLPQESSFPNIPYLIACWLLVCCLLFGTLKLLLAVIEDHRD

SEQ ID NO: 2025 - protein, 236 aa, Mycobacterium smegmatis
MQTRPRFAVQSLFAILATAAALVAGCSSSSETSDAPLPDGAALLQESASKTKTQQSVHLLLTVQGKVDGLPVEKLDGDLTNAPAVAAEGTADLIAFGQKIADAKFVIADGNLYAALTPGDPLSNYGAAANIYDVSAILNPDTGLANVLANFSDATADGRESINGTEAVRVKGNVSADAVNKIAPALKADGPVPGTAWITEDDHTLLQAQLEPTPGNSVTMTLSDWGKQVNVTKPAA

SEQ ID NO: 2026 - protein, 544 aa, Chlamydophila caviae
MAAKNIKYNEDARKKIHKGVKTLAEAVKVTLGPKGRHVVIDKSFGSPQVTKDGVTVAKEIELEDKHENMGAQMVKEVASKTADKAGDGTTTATVLAEAIYSEGLRNVTAGANPMDLKRGIDKAVKVVVDEIKKISKPVQHHKEIAQVATISANNDAEIGNLIAEAMEKVGKNGSITVEEAKGFETVLDVVEGMNFNRGYLSSYFSTNPETQECVLEEALVLIYDKKISGIKDFLPVLQQVAESGRPLLIIAEDIEGEALATLVVNRLRAGFRVCAVKAPGFGDRRKAMLEDIAILTGGQLISEELGMKLENTTLAMLGKAKKVIVSKEDTTIVEGLGSKEDIESRCESIKKQIEDSTSDYDKEKLQERLAKLSGGVAVIRVGAATEIEMKEKKDRVDDAQHATLAAVEEGILPGGGTALVRCIPTLEAFIPILTNEDEQIGARIVLKALSAPLKQIAANAGKEGAIICQQVLSRSSSEGYDALRDAYTDMIEAGILDPTKVTRCALESAASVAGLLLTTEALIADIPEEKSSSAPAMPGAGMDY

SEQ ID NO: 2027 - protein, 301 aa, Mycobacterium leprae
MRGLSAVVRVLCVAALAVGVFAAAVLLAGTAGNAKAAGYESLMVPSNAMGRDIPVAFMAGGPHAVYLLDAFNAALDVSNWVTAGNAMTTLGGRGISVVAPAGGAYSMYTNWENDGSKQWDTFLSSELPDWLATKRGLAPDGHAAVGASQGGYAALALAAFHPDRFGFAGSLSGFVYPSSTNYNGAILAGLQQFGGIDGNGMWGAPQLGRWKWHDPYVHASLLAQNNTRVWVYSPMTMGGDIDAMIGQAVASMGSSREFYQQYRSVGGHNGHFDFSGGGDNGWGAWAPQLAAMSGDIVGAIR

SEQ ID NO: 2028 - protein, 537 aa, Streptococcus pyogenes
MLACLAILAVVGLGMTRVSALSKDDTAQLKITNIEGGPTVTLYKIGEGVYNTNGDSFINFKYAEGVSLTETGPTSQEITTIANGINTGKIKPFSTENVSISNGTATYNARGASVYIALLTGATDGRTYNPILLAASYNGEGNLVTKNIDSKSNYLYGQTSVAKSSLPSITKKVTGTIDDVNKKTTSLGSVLSYSLTFELPSYTKEAVNKTVYVSDNMSEGLTFNFNSLTVEWKGKMANITEDGSVMVENTKIGIAKEVNNGFNLSFIYDSLESISPNISYKAVVNNKAIVGEEGNPNKAEFFYSNNPTKGNTYDNLDKKPDKGNGITSKEDSKIVYTYQIAFRKVDSVSKTPLIGAIFGVYDTSNKLIDIVTTNKNGYAISTQVSSGKYKIKELKAPKGYSLNTETYEITANWVTATVKTSANSKSTTYTSDKNKATDNSEQVGWLKNGIFYSIDSRPTGNDVKEAYIESTKALTDGTTFSKSNEGSGTVLLETDIPNTKLGELPSTGSIGTYLFKAIGSAAMIGAIGIYIVKRRKA

SEQ ID NO: 2029 - protein, 246 aa, Shigella boydii; identical to SEQ ID NO: 1265

SEQ ID NO: 2030 - protein, 584 aa, Mycobacterium tuberculosis
MSFVIVARDALAAAAADLAQIGSAVNAGNLAAANPTTAVAAAAADEVSAALAALFGAHAREYQAAAAQAAAYHEQFVHRLSAAATSYAVTEVTIATSLRGALGSAPASVSDGFQAFVYGPIHATGQQWINSPVGEALAPIVNAPTNVLLGRDLIGNGVTGTAAAPNGGPGGLLFGDGGAGYTGGNGGSAGLIGNGGTGGAGFAGGVGGMGGTGGWLMGNGGMGGAGGVGGNGGAGGQALLFGNGGLGGAGGAGGVDGAIGRGGWFIGTGGMATIGGGGNGQSIVIDFVRHGQTPGNAAMLIDTAVPGPGLTALGQQQAQAIANALAAKGPYAGIFDSQLIRTQQTAAPLANLLGMAPQVLPGLNEIHAGIFEDLPQISPAGLLYLVGPIAWTLGFPIVPMLAPGSTDVNGIVFNRAFTGAVQTIYDASLANPVVAADGNITSVAYSSAFTIGVGTMMNVDNPHPLLLLTHPVPNTGAVVVQGNPEGGWTLVSWDGIPVGPASLPTALFVDVRELITAPQYAAYDIWESLFTGDPAAVINAVRDGADEVGAAVVQFPHAVADDVIDATGHPYLSGLPIGLPSLIP

SEQ ID NO: 2031 - protein, 416 aa, Escherichia coli; identical to SEQ ID NO: 1309

SEQ ID NO: 2032 - protein, 505 aa, Salmonella moscow
MAQVINTNSLSLLTQNNLNKSQSSLSSAIERLSSGLRINSAKDDAAGQAIANRFTSNIKGLTQASRNANDGISIAQTTEGALNEINNNLQRVRELSVQATNGTNSDSDLKSIQDEIQQRLEEIDRVSNQTQFNGVKVLSQDNQMKIQVGANDGETITIDLQKIDVKSLGLDGFNVNGPKEATVGDLKSSFKNVTGYDTYAAGADKYRVDINSGAVVTDAAAPDKVYVNAANGQLTTDDAENNTAVDLFKTTKSTAGTAEAKAIAGAIKGGKEGDTFDYKGVTFTIDTKTGDGGNGKVSTTINGEKVTLTVADIATGATNVNAATLQSSKNVYTSVVNGQFTFDDKTKNESAKLSDLEANNAVKGESKITVNGAEYTANATGDKITLAGKTMFIDKTASGVSTLINEDAAAAKKSTANPLASIDSALSKVDAVRSSLGAIQNRFDSAITNLGNTVTNLNSARSRIEDADYATEVSNMSKAQILQQAGTSVLAQANQVPQNVLSLLR

SEQ ID NO: 2033 - protein, 384 aa, Klebsiella pneumoniae
MKSKKILIVGAGFSGAVIGRQLAEKGHQVHIIDQRDHIGGNSYDARDSETNVMVHVYGPHIFHTDNETVWNYVNKHAEMMPYVNRVKATVNGQVFSLPINLHTINQFFSKTCSPDEARALIAEKGDSTIADPQTFEEQALRFIGKELYEAFFKGYTIKQWGMQPSELPASILKRLPVRFNYDDNYFNHKFQGMPKCGYTQMIKSILNHENIKVDLQREFIVEERTHYDHVFYSGPLDAFYGYQYGRLGYRTLDFKKFTYQGDYQGCAVMNYCSVDVPYTRITEHKYFSPWEQHDGSVCYKEYSRACEENDIPYYPIRQMGEMALLEKYLSLAENETNITFVGRLGTYRYLDMDVTIAEALKTAEVYLNSLTENQPMPVFTVSVR

SEQ ID NO: 2034 - protein, 207 aa, Escherichia coli
MSTIIMDLCSYTRLGLTGYLLSRGVKKREINDIETVDDLAIACDSQRPSVVFINEDCFIHDASNSQHIKHIINQHPNTLFIVFMAIANVHFDEYLLVRKNLLISSKSIKPESLDDILGDILKKETTITSFLNMPTLSLSRTESSMLRMWMAGQGTIQISDQMNIKAKTVSSHKGNIKRKIKTHNKQVIYHVVRLTDNVTNGIFVNMR

SEQ ID NO: 2035 - protein, 367 aa, Escherichia coli [sequence omitted]

SEQ ID NO: 2036 - protein, 308 aa, Yersinia pseudotuberculosis
MKILLTGAGGMVGKNILAHTKSKDYEFITPSSKELDLLEKKHITTYLKHHKPNFIIHAAGIVGGIHANINNPVKFLVENMQMGINLLTAAKDNNIRKLLNLGSSCMYPKDCDSGLTEDMILTGELESTNEGYALAKITSAKLCEYINREDSEFQYKTAIPCNLYGKYDKFDENNSHMIPAVIKKIVTAIETGKSEVEIWGDGEARREFMYAEDLADFIFYTINNFTKMPQNINVGLGQDYTITEYYKVIAKILGYKGTFVYDKSKPVGMRRKLIDNTLLSEFGWSNKVDLESGISKTCQYFLNEKNND

SEQ ID NO: 2037 - protein, 454 aa, Yersinia pestis bv. Antiqua; identical to SEQ ID NO: 1357

SEQ ID NO: 2038 - protein, 325 aa, Mycobacterium tuberculosis; identical to SEQ ID NO: 1290

SEQ ID NO: 2039 - protein, 361 aa, Yersinia enterocolitica [sequence omitted]

SEQ ID NO: 2040 - protein, 246 aa, Escherichia coli
MSKAVIVIPARYGSSRLPGKPLLDIVGKPMIQHVYERALQVAGVAEVWVATDDPRVEQAVQAFGGKAIMTRNDHESGTDRLVEVMHKVEADIYINLQGDEPMIRPRDVETLLQGMRDDPALPVATLCHAISAAEAAEPSTVKVVVNTRQDALYFSRSPIPYPRNAEKARYLKHVGIYAYRRDVLQNYSQLPESMPEQAESLEQLRLMNAGINIRTFEVAATGPGVDTPACLEKVRALMAQELAENA

SEQ ID NO: 2041 - protein, 189 aa, Mycobacterium tuberculosis; identical to SEQ ID NO: 1945

SEQ ID NO: 2042 - protein, 410 aa, Ehrlichia canis
MANVVVTGEQLDKAIREVVHILEDAVGCTAGPKGLTVAISKPYGAPEITKDGYKVIKSIKPEDPLALAIANIIAQSASQCNDKVGDGTTTCSILTAKVIEEVSKAKAAGADIVCIKDGVLKAKEAVLDALMSMKREVLSEEEIAQVATISANGDKNIGVKIAQCVQEVGKDGVITVEESKGFKELDVEKTDGMQFDRGYLSPYFVTNSEKMLVEFENPYILLTEKKLNIIQPILPILENVARSGRPLLIIAEDVEGEALSTLVLNKLRGGLHVAAVKAPGFGDRRKDMLGDIAILTGAKHVISDDLAIKMEDLTLAELGTAKNIRITKDTTTIIGSVDNSSDNVQSRINQIKVQIESSTSDYDKEKLRERLAKLSGGVAVLKVGGSSEVEVKERKDRVEDALHATRAAVE

SEQ ID NO: 2043 - protein, 299 aa, Mycobacterium tuberculosis; identical to SEQ ID NO: 1867

SEQ ID NO: 2044 - protein, 294 aa, Aggregatibacter actinomycetemcomitans
MKILVTGGSGFIGKNLIYLLREKREFEVFGATVEETMDLTNPCSVQSVLEKTKPDFIVHLAALTFVPNNNPITFYLVNTIGTENLLRSIVDLNVAKLGVLCFSTAGIYGIQETKLLSESLTPKPVNHYSMSKHCMEHIVNKYRCFRGITVVRPFNVLGLGQNINFLVPKMVSAFVKKDKTIELGNLDSVRDFISVNDCCDIIYRLISKLIENETINICTGIGYSVYQIFQLLCEISMHQMEIKQNELFVRHDDIPQMIGDPSKLLNVLGNDYRFTSVRAILEEMYKNRLLELSI

SEQ ID NO: 2045 - protein, 246 aa, Shigella boydii; identical to SEQ ID NO: 1265

SEQ ID NO: 2046 - protein, 652 aa, Mycobacterium tuberculosis
MTVTPRTGSRIEELLARSGRFFIPGEISADLRTVTRRGGRDGDVFYRDRWSHDKVVRSTHGVNCTGSCSWKIYVKDDIITWETQETDYPSVGPDRPEYEPRGCPRGAAFSWYTYSPTRVRHPYARGVLVEMYREAKARLGDPVAAWADIQADPRRRRRYQRARGKGGLVRVSWAEATEMIAAAHVHTISTYGPDRVAGFSPIPAMSMVSHAAGSRFVELIGGVMTSFYDWYADLPVASPQVFGDQTDVPESGDWWDVVWQCASVLLTYPNSRQLGTAEELLAHIDGPAADLLGRTVSELRRADPLTAATRYVDTFDLRGRATLYLTYWTAGDTRNRGREMLAFAQTYRSTDVAPPRGETPDFLPVVLEFAATVDPEAGRRLLSGYRVPIAALCNALTEAALPYAHTVAAVCRTGDMMGELFWTVVPYVTMTIVAVGSWWRYRYDKFGWTTRSSQLYESRLLRIASPMFHFGILVVIVGHGIGLVIPQSWTQAAGLSEGAYHVQAVVLGSIAGITTLAGVTLLIYRRRTRGPVFMATTVNDKVMYLVLVAAIVAGLGATALGSGVVGEAYNYRETVSVWFRSVWVLQPRGDLMAEAPLYYQIHVLIGLALFALWPFTRLVHAFSAPIGYLFRPYIIYRSREELVLTRPRRRGW

SEQ ID NO: 2047 - protein, 454 aa, Cronobacter sakazakii
MSLLQFSGLFIVWLLATLFIGTLTWFEFRRVRFNFNVFFSLLFLLTFFFGFPLTSILVFRFNVAVVPAEVLLQALLSAGCFYAVYYVTYKTRLRTARAQAASSGGGLFTMNRVETHLAWMVMMAVALVSVGIFFMHNGFLLFRLHSYSQIFSSEVSGVALKRFFYFFIPAMLVVYFLRQSSRAWLFFLVSTVGFGLLTYMIVGGTRANIIIAFAIFLFIGIIRGWISPGMLAAAGVMGIVGMFWLALKRYGLNVSGDEAFYTFLYLTRDTFSPWENLALLLQHYGDIEFQGLAPIARDFYVFIPSWVWPDRPHIVLNTANYFTWEVLNNHSGLAISPTLLGSLVVMGGVWFIPPGAVVVGLIIKWFDWLYERGNHEPNRYKAAILHSFCFGAIFNMIVLAREGLDAFVSRVIFFMVVFGACLVVAKLIYWLLDSAGLIQPRRRRAAPLSPTETL

SEQ ID NO: 2048 - protein, 168 aa, Escherichia coli
MLKIKYLLIGLSLSAMSSYSLAAAGPTLTKELALNVLSPAALDATWAPQDNLTLSNTGVSNTLVGVLTLSNTSIDTVSIASTNVSDTSKNGTVTFAHETNNSASFATTISTDNANITLDKNAGNTIVKTTNGSQLPTNLPLKFITTEGNEHLVSGNYRANITITSTIK

SEQ ID NO: 2049 - protein, 384 aa, Klebsiella pneumoniae
MNNKNIMIVGAGFSGVVIARQLAEQGYTVKIIDRRDHIGGNSYDTRDPQTDVMVHVYGPHIFHTDNETVWNYVNQYAEMMPYVNRVKATVNGQVFSLPINLHTINQFFAKTCSPDEARALISEKGDSSIVEPQTFEEQALRFIGKELYEAFFKGYTIKQWGMEPSELPASILKRLPVRFNYDDNYFNHKFQGMPKLGYTRMIEAIADHENISIELQREFLPEEREDYAHVFYSGPLDAFYSYQYGRLGYRTLDFEKFTYQGDYQGCAVMNYCSIDVPYTRITEHKYFSPWESHEGSVCYKEYSRACGENDIPYYPIRQMGEMALLEKYLSLAESEKNITFVGRLGTYRYLDMDVTIAEALKTADEFLSSVANQEEMPVFTVPVR

SEQ ID NO: 2050 - protein, 199 aa, Streptococcus pyogenes; identical to SEQ ID NO: 1802

SEQ ID NO: 2051 - protein, 124 aa, Shigella flexneri
MLKIGKLLTSSFFSYFLIGIVNTALHWGVFYACYNNLAFGQGRSNIVGFICAATFSFFANARCSFKVSATKARYFIFIFFMGAMSYLFGVLFDLLALSPIFTLFTFSLFSLVLGYCASKYFIFR

SEQ ID NO: 2052 - protein, 96 aa, Coxiella burnetii
MKIRPLHDRVVVRRLEEERTSAGGIVIPDSAAEKPSRGEVISVGPGKPLDNGEVRSLDVKVGDQILFGKYAGTEVKLAGDEYIVMREDDIMGVIEK

SEQ ID NO: 2053 - protein, 454 aa, Yersinia pseudotuberculosis; identical to SEQ ID NO: 1357

SEQ ID NO: 2054 - protein, 333 aa, Mycobacterium leprae
MKFLQQMRKLFGLAAKFPARLTIAVIGTALLAGLVGVVGDTAIAVAFSKPGLPVEYLQVPSPSMGHDIKIQFQGGGQHAVYLLDGLRAQEDYNGWDINTPAFEEYYHSGLSVIMPVGGQSSFYSNWYQPSQGNGQHYTYKWETFLTQEMPSWLQANKNVLPTGNAAVGLSMSGSSALILASYYPQQFPYAASLSGFLNPSEGWWPTMIGLAMNDSGGYNANSMWGPSTDPAWKRNDPMVQIPRLVANNTRIWVYCGNGAPNELGGDNIPAKFLESLTLSTNEIFQNTYAASGGRNGVFNFPPNGTHSWPYWNQQLVAMKPDIQQILNGSNNNA

SEQ ID NO: 2055 - protein, 361 aa, Yersinia pseudotuberculosis
MITLTHVLGSDIPHHNLTVLRFFNDVLAKCLPVEQVRHFMVAAKETAPFSSFPQLDIDTYSDKKALAEAVIARAQADRSARFFWHGQFNATLWLALLSGKIKPGQVYWHVWGADLYEDAKSLKFRLFYLLRRIAQGRVGHVFATRGDLIHYQQRHPRVPASLLYFPTRMDPALTAINIDKPLAGPMTILVGNSGDTTNRHIEALKAIHQQFGPDVRVILPMGYPANNEAYIEQVRQAGLALFSQDNLRILTEQIPFDDYLNILRECDLGYFIFNRQQGIGTLCLLTQFGVPFVLSRKNPFWQDLAEQHIPVFFYGDTLDEPLIREAQRQLAGLDKQAIAFFNPNYIEGWKQALALAAGEHP

SEQ ID NO: 2056 - protein, 675 aa, Escherichia coli
MIGIYSPGIWRIPHLEKFLAQPCQKLSLLRPVPQEVDAIAVWGHRPSAAKPVAIAKAAGKPVIRLEDGFVRSLDLGVNGEPPLSLVVDDYCIYYDASKPSALEKLVQDKAGNTALISQAREAMHTIVTGDLSKYNLAPAFVADESERSDIVLVVDQTFNDMSVTYGNAGPHEFAAMLEAAMAENPQAEIWVKVHPDVLEGKKTGYFAALRATQRVRLIAENVSPQSLLRHVSRVYVVTSQYGFEALLAGKPVTCFGQPWYAGWGLTDDRHPQSALLSARRGSATLEELFAAAYLRYCRYIDPQTGEVSNLFTVLQWLQLQRRHLQQRNGYLWAPGLTLWKSAILKPFLQTATNRLSFSRRCTAASACVVWGVKGEQQWRAEAQRKSLPLWRMEDGFLRSSGLGSDLLPPLSLVLDKRGIYYDATRPSDLEVLLNHSQLTLAQQMRAEKLRQRLVESKLSKYNLGADFSLPAEAKDKKIILVPGQVEDDASIKTGTVSIKSNLELLRTVRERNPHAYIIYKPHPDVLVGNRKGNIPTELIAELADYQALDADIIQCIQRADEVHTMTSLSGFEALLHGKQVHCYGLPFYAGWGLTVDEHHCPRREQKLTIADLIYQTLIVYPTYIHPTLLQPISVEEAAEYLIQTPRKPMFITRKKAGRVIRYYRKLIMFCKVRFG

SEQ ID NO: 2057 - protein, 175 aa, Helicobacter pylori
MKNQVKKILGMSVVAAMVIVGCSHAPKSGISKSNKAYKEATKGAPDWVVGDLEKVAKYEKYSGVFLGRAEDLITNNDVDYSTNQATAKARANLAANLKSTLQKDLENEKTRTVDASGKRSISGTDTEKISQLVDKELIASKMLARYVGKDRVFVLVGLDKQIVDKVREELGMVKK

SEQ ID NO: 2058 - protein, 360 aa, Escherichia coli
MNKILFIFTLFFSSGFFTFAVSADKNPGSENMTNTIGPHDRGGSSPIYNILNSYLTAYNGSHHLYDRMSFLCLSSQNTLNGACPSSDAPGTATIDGETNITLQFTEKRSLIKRELQIKGYKQFLFKNANCPSKLALNSSHFQCNREQASGATLSLYIPAGELNKLPFGGVWNAVLKLNVKRRYDTTYGTYTINITVNLTDKGNIQIWLPQFKSNARVDLNLRPTGGGTYIGRNSVDMCFYDGYSTNSSSLEIRFQDDNSKSDGKFYLKKINDDSKELVYTLSLLLAGKNLTPTNGQALNINTASLETNWNRITAVTMPEISVPVLCWPGRLQLDAKVKNPEAGQYMGNIKITFTPSSQTL

SEQ ID NO: 2059 - protein, 299 aa, Mycobacterium tuberculosis; identical to SEQ ID NO: 1867

SEQ ID NO: 2060 - protein, 837 aa, Treponema pallidum
MLKKASAFLIASCCVMSLAWAQANDNWYEGKPISAISFEGLEYIARGQLDTIFSQYKGQKWTYELYLEILQKVYDLEYFSEVSPKAVPTDPEYQYVMLQFTVKERPSVKGIKMVGNSQIRSGDLLSKILLKKGDIYNEVKMKVDQESLRRHYLDQGYAAVKISCEAKTEAGGVVVQFTIQEGKQTVVSRIQFKGNKAFTESVLKKVLSTQEARFLTSGVFKENALEADKAAVHSYYAERGYIDARVEGVAKTVDKKTDASRNLVTLTYTVVEGEQYRYGGVTIVGNQIFSTEELQAKIRLKRGAIMNMVAFEQGFQALADAYFENGYTSNYLNKEEHRDTAEKTLSFKITVVERERSHVEHIIIKGTKNTKDEVILREMLLKPGDVFSKSKFTDSLRNLFNLRYFSSLVPDVRPGSEQDLVDIILNVEEQSTANVQFGVTFSGVGEAGTFPLSLFCQWEEKNFLGKGNEISVNATLGSEAQSLKLGYVERWFLGSPLTVGFDFELTHKNLFVYRAGSYGNGLPHPYTSREQWASSPGLAESFRLKYSRFESAIGAHTGYQWYPRYAVIRVNGGVDFRVVKNFYDKDNNQPFDLTVKEQLNWTSINSFWTSVSFDGRDFAYDPSSGWFLGQRCTFNGLVPFLEKEHSFRSDTKAEFYVTLLNYPVSAVWNLKFVLAFYTGVSVQTYYGRRKSENGKGNGVRSGALVIDGVLVGRGWSEDAKKNTGDLLLHHWIEFRWPLAHGIVSFDFFFDAAMVYNIESQSPNGSSSASSSSSSSSSSSRTTSSEGLYKMSYGPGLRFTLPQFPLKLAFANTFTSPGGIPKTKKNWNFVLSFTVNNL

SEQ ID NO: 2061 - protein, 246 aa, Shigella dysenteriae; identical to SEQ ID NO: 1265

SEQ ID NO: 2062 - protein, 395 aa, Mycobacterium tuberculosis
MRGQAANLVLATWISVVNFWAWNLIGPLSTSYARDMSLSSAEASLLVATPILVGALGRIVTGPLTDRFGGRAMLIAVTLASILPVLAVGVAATMGSYALLVFFGLFLGVAGTIFAVGIPFANNWYQPARRGFSTGVFGMGMVGTALSAFFTPRFVRWFGLFTTHAIVAAALASTAVVAMVVLRDAPYFRPNADPVLPRLKAAARLPVTWEMSFLYAIVFGGFVAFSNYLPTYITTIYGFSTVDAGARTAGFALAAVLARPVGGWLSDRIAPRHVVLASLAGTALLAFAAALQPPPEVWSAATFITLAVCLGVGTGGVFAWVARRAPAASVGSVTGIVAAAGGLGGYFPPLVMGATYDPVDNDYTVGLLLLVATALVACTYTALHAREPVSEEASR

SEQ ID NO: 2063 - protein, 450 aa, Escherichia coli; identical to SEQ ID NO: 1311

SEQ ID NO: 2064 - protein, 162 aa, Dichelobacter nodosus
MKSLQKGFTLIELMIVVAIIGILAAFAIPAYNDYIARTQVSEGVSLADGLKIRIADNLQDGKCTSEGDPASGEVGNTDMGKYALATIEGTPDANLAGLTPKDPNGCKVKIEYGKGTAGDNISPLIKGQMLVLNQLVNGSYDKDSSSTVKPKFLPKALKEATP

SEQ ID NO: 2065 - protein, 605 aa, Bacteroides fragilis
MKKYLHILPACFLFYAAAHAQQKDTVYVTDFGAVPYSYENCVTQIQAAIDECKRTGAKVLSLPEGRYDIWPEGAIRKEYYISNTSTEQECPSKVKTVGLMLHEIDDLTIEGNGATLMYHGKMTTIALEHCNGVRINNLHIDFERPAGSEIQYRKVTGGETEVTLHRDTRYEIVNGKIRLYGEGWRSNRNHCIEYDPDTESFTYSQGWNTLSASDAREIAPGIVRFNTPAEFMPKAGNTLTVRDIIRDQVGLFILESKNITLSRLQMHYMHGLGIVSQYTENITMDRVKCAPRPDSGRLLAASADMMHFSGCKGKVIIDSCYFAGAQDDPVNVHGTNLRALEKIDAQTLKLRFMHGQSYGFNAYFKGDTVAFVRAATMERFASATVRDVRRISDRIVEVRFDRDIPTSLELNHDCVENMTCTPEVEIRNCYFTRTSTRGTLVTTPRKVVIENNTYYKTGMSAILIEADAEGWYESGPVKDVLIKGNTFIDCAYNGGPGHAVIAIHPSNKIIDAERPVHQNIRIEDNTFRTFDYPVLYAKSTAGLLFRNNTIVRTETFPAVSGNPYVFYLNGCKKAVIEGTVFEGETPRQSIKTENMKRKDLKTTIK

SEQ ID NO: 2066 - protein, 204 aa, Streptococcus pneumoniae
MFKRIRRVLVLAVFLFAGYKAYRVHQDVKQVMTYQPMVREMLSEKDTPANEELVLAMIYTETKGKEGDVMQSSESASGSTNTINDNASSIRQGIQTLTGNLYLAQKKGVDIWTAVQAYNFGPAYIDFIAQNGKENTLALAKQYSRETVAPLLGNRTGKTYSYIHPISIFHGAELYVNGGNYYYSRQVRLNLYIIKCFTLFSTSG

SEQ ID NO: 2067 - protein, 309 aa, Shigella flexneri
MKISLVVPVFNEEEAIPVFYKTVREFQELKPYEVEIVFINDGSKDATESIINALAVSDPLVVPLSFTRNFGKEPALFAGLDHASGDAVIPIDVDLQDPIEVIPHLIEKWQAGADMVLAKRSDRSTDGRLKRKTAEWFYKLHNKISTPKIEENVGDFRLMSREVVENIKLLPERNLFMKGILSWVGGQTDVVEYVRAERVAGISKFNGWKLWNLALEGITSFSTFPLRVWTYIGLFVASISFLYGAWMIIDTLVFGNPVRGYPSLLVSILFLGGVQLIGIGVLGEYIGRIYIEVKNRPKYIIKKSHRGNP

SEQ ID NO: 2068 - protein, 100 aa, Mycobacterium paratuberculosis
MAKVNIKPLEDKILVQANEAETTTASGLVIPDTAKEKPQEGTVVAVGPGRWDDDGAKRIPLDVSEGDTVIYSKYGGTEIKYNGEEYLILSARDVLAVVSK

SEQ ID NO: 2069 - protein, 454 aa, Yersinia pestis; identical to SEQ ID NO: 1357

SEQ ID NO: 2070 - protein, 347 aa, Mycobacterium avium
MTLVDRLRGAVAGMPRRLVVGAAGAALLSGLIGAVGGSATAGAFSRPGLPVEYLQVPSAAMGRDIKVQFQSGGANSPALYLLDGMRAQDDFNGWDINTPAFEWYNQSGISVAMPVGGQSSFYSDWYKPACGKAGCTTYKWETFLTSELPQYLSAQKQVKPTGSGVVGLSMAGSSALILAAYHPDQFVYAGSLSALLDPSQGMGPSLIGLAMGDAGGYKAADMWGPKEDPAWARNDPSLQVGKLVANNTRIWVYCGNGKPSDLGGDNLPAKFLEGFVRTSNLKFQDAYNGAGGHNAVWNFDANGTHDWPYWGAQLQAMKPDLQSVLGATPGAGPATAAATNAGNGQGT

SEQ ID NO: 2071 - protein, 361 aa, Yersinia pestis; identical to SEQ ID NO: 1319

SEQ ID NO: 2072 - protein, 326 aa, Yersinia pestis
MIRAYEQNPQHFIEDLEKVRVEQLTGHGSSVLEELVQLVKDKNIDISIKYDPRKDSEVFANRVITDDIELLKKILAYFLPEDAILKGGHYDNQLQNGIKRVKEFLESSPNTQWELRAFMAVMHFSLTADRIDDDILKVIVDSMNHHGDARSKLREELAELTAELKIYSVIQAEINKHLSSSGTINIHDKSINLMDKNLYGYTDEEIFKASAEYKILEKMPQTTIQVDGSEKKIVSIKDFLGSENKRTGALGNLKNSYSYNKDNNELSHFATTCSDKSRPLNDLVSQKTTQLSDITSRFNSAIEALNRFIQKYDSVMQRLLDDTSGK

SEQ ID NO: 2073 - protein, 161 aa, Mycobacterium avium
MNRQLRFAVAGPEILAAVVSGCSSGNKSAPSSSASSSSTSPSASSGGAAGTKVIIDGKDQNVSGSVVCTNAGGTVNIAIGGAATGIAAVLSDGNPPQVKSVGLGNVNGVTLGYTSGTGQGNASAEKNGNSYKITGTATGVDMANPLQPVNKPFEIDVTCNS

SEQ ID NO: 2074 - protein, 112 aa, Mycobacterium bovis
MAHFAVGFLTLGLLVPVLTWPVSAPLLVIPVALSASIIRLRTLADERGVTVRTLVGSRAVRWDDIDGLRFHRGSWARATLKDGTELRLPAVTFATLPHLTEASSGRVPNPYR

SEQ ID NO: 2075 - protein, 173 aa, Mycobacterium bovis; identical to SEQ ID NO: 1563

SEQ ID NO: 2076 - protein, 442 aa, Coxiella burnetii
MRGNFMSSIEKLGGLKQRLTITVPAEEVDKAYKSRLLKVARTAKIPKFRPGKASPAVVEKLYGKAILQEVGSELIQSSLREAVEEHQLRVAGAPDIKMDKILRGEPFKYVVNFEVYPEITLESLAGETIERTQVEITEEDLDKMLEALRKQYAEWKEMDRPAKADDRVIIDFEGTLDGKPFERGSAKDFQLELGSKRMIAGFEEGIEGMKPGESKALDITFPADYPSEDLAGKAAVFNITLQKVMAPELPVLDEQFAERLGIKEGGLEALRQKVRTNMEKEVHHHMENKLKMAVLDKLIERNPIEVPESLIEAEIDHLQQMTRQQVAMQTHKPDEAKKMELPRDPYREQATKRVKLGLLLAEVVKQHKIKADPEQLRARVEEVAASYQDPEKVISWYYTNKQMLSEIESVVLEDQAVAQLMSELEVKDQAIPYEEAVKQIQQ

SEQ ID NO: 2077 - protein, 359 aa, Escherichia coli; identical to SEQ ID NO: 1303

SEQ ID NO: 2078 - protein, 168 aa, Mycobacterium bovis; identical to SEQ ID NO: 1915

SEQ ID NO: 2079 - protein, 450 aa, Escherichia coli; identical to SEQ ID NO: 1311

SEQ ID NO: 2080 - protein, 156 aa, Dichelobacter nodosus
MKSLQKGFTLIELMIVVAIIGILAAIAIPQYQNYIARSQVSRVMSETGQMRTAIETCLLDGKEGKDCFIGWTTSNLLAAAGGSTTNNATAADPGQGGLNITYALESTAENKIEATFGQNAAATLHGKKLTWTRSPEATWSCSTDVDEKFKPTGCKK

SEQ ID NO: 2081 - protein, 372 aa, Yersinia enterocolitica
MKKALITGITGQDGSYLAEFLLEKGYQVHGIKRRSSSFNTSRIDHIYQDPHEVNPHFFLHYGDLTDTSNLIRLVKEIQPDEIYNLGAQSHVAVSFESPEYTADVDAMGTLRLLEAVRINGLEHKTRFYQASTSELYGLVQEIPQRETTPFYPRSPYAVAKMYAYWITVNYRESYGMYACNGILFNHESPRRGETFVTRKITRAIANIALGLEDCLYLGNMDSLRDWGHAKDYVRMQWMMLQQDQPEDFVIATGKQITVREFVRMSAKEAGIEIEFSGKGIDEIATISAISDEYATSAKVGDIIVRVDPRYFRPAEVETLLGDPSKAKEKLGWVPEITVEEMCAEMVAGDLQQAKQHALLKANGFDVSITLES

SEQ ID NO: 2082 - protein, 158 aa, Brucella abortus
MNQSCPNKTSFKIAFIQARWHADIVDEARKSFVAELAAKTGGSVEVEIFDVPGAYEIPLHAKTLARTGRYAAIVGAAFVIDGGIYRHDFVATAVINGMMQVQLETEVPVLSVVLTPHHFHESKEHHDFFHAHFKVKGVEAAHAALQIVSERSRIAALV

SEQ ID NO: 2083 - protein, 288 aa, Staphylococcus aureus; identical to SEQ ID NO: 1371

SEQ ID NO: 2084 - protein, 541 aa, Anaplasma phagocytophilum
MSNTVVTGEVLDKSIREVVRILEDAVGCTAGPKGLTVAISKPYGSPEITKDGYKVMKSIKPEEPLAAAIASIITQSASQCNDKVGDGTTTCSILTAKVIEEVSKAKAAGSDIVSIKNGILKAKEAVLTALMSMRREVEEDEIAQVATLSANGDKNIGSKIAQCVKEVGKDGVITVEESKGFKDLEVEKTDGMQFDRGYLSPYFVTNAEKMLVEFENPYIFLTEKKINLVQSILPILENVARSGRPLLIIAEDVEGEALSTLVLNKLRGGLQVAAVKAPGFGDRRKDMLGDIAVIVGAKYVVNDELAVKMEDIALSDLGTAKSVRITKDATTIIGSVDSSSESIASRTNQIKAQIENSSSDYDKEKLRERLAKLSGGVAVLKVGGSSEVEVKERKDRVEDALHATRAAVEEGVVPGGGAALLYALSSLDGLKGKNDDEQWGIDIIRRAACAPIKRIIKNSGSEEAPCVIQHLLKQNDKELIYNVDTMNYANAFTSGVMDPLKVVRIAFDLAVSLAAVFMTLNAVVVDVPSKNDAAGAGAGGM

SEQ ID NO: 2085 - protein, 234 aa, Bartonella henselae
MKHSLRTLWRLRVKINEFNEYIKEARSFDIDRMHGMRQRMRIAMALTVLFGLMTIALALAVAALTPLKTVEPFVIRVDNSTGIIETVSALKETPNDYDEAITRYFASKYVRAREGFQLSEAEHNFRLVSLLSSPEEQSRFAKWYAGNNPESPQNIYQNMIATVTIKSISFLSKDLIQVRYYKTVRELNDKENISHWVSILNFSYINAQISTQDRLINPLGFQVSEYRSDPEVIQ

SEQ ID NO: 2086 - protein, 340 aa, Mycobacterium tuberculosis; identical to SEQ ID NO: 1370

SEQ ID NO: 2087 - protein, 359 aa, Escherichia coli; identical to SEQ ID NO: 1711

SEQ ID NO: 2088 - protein, 326 aa, Yersinia pestis
MIRAYEQNPQHFIEDLENVRVEQLTGHGSSVLEELVQLVKDKNIDISIKYDPRKDSEVFANRVITDDIELLRKILAYFLPEDAILKGGHYDNQLQNGIKRVKEFLESSPNTQWELRAFMAVMHFSLTADRIDDDILKVIVDSMNHHGDARSKLREELAELTAELKIYSVIQAEINKHLSSSGTINIHDKSINLMDKNLYGYTDEEIFKASAEYKILEKMPQTTIQVDGSEKKIVSIKDFLGSENKRTGALGNLKNSYSYNKDNNELSHFATTSSDKSRPLNDLVSQKTTQLSDITSRFNSAIEALNRFIQKYDSVMQRLLDDTSGK

SEQ ID NO: 2089 - protein, 244 aa, Mycobacterium tuberculosis
MKHPPCSVVAAATAILAVVLAIGGCSTEGDAGKASDTAATASNGDAAMLLKQATDAMRKVTGMHVRLAVTGDVPNLRVTKLEGDISNTPQTVATGSATLLVGNKSEDAKFVYVDGHLYSDLGQPGTYTDFGNGASIYNVSVLLDPNKGLANLLANLKDASVAGSQQADGVATTKITGNSSADDIATLAGSRLTSEDVKTVPTTVWIASDGSSHLVQIQIAPTKDTSVTLTMSDWGKQVTATKPV

SEQ ID NO: 2090 - protein, 261 aa, Mycobacterium bovis
MPKRSEYRQGTPNWVDLQTTDQSAAKKFYTSLFGWGYDDNPVPGGGGVYSMATLNGEAVAAIAPMPPGAPEGMPPIWNTYIAVDDVDAVVDKVVPGGGQVMMPAFDIGDAGRMSFITDPTGAAVGLWQANRHIGATLVNETGTLIWNELLTDKPDLALAFYEAVVGLTHSSMEIAAGQNYRVLKAGDAEVGGCMEPPMPGVPNHWHVYFAVDDADATAAKAAAAGGQVIAEPADIPSVGRFAVLSDPQGAIFSVLKPAPQQ

SEQ ID NO: 2091 - protein, 173 aa, Mycobacterium tuberculosis; identical to SEQ ID NO: 1563

SEQ ID NO: 2092 - protein, 257 aa, Staphylococcus epidermidis; identical to SEQ ID NO: 1244

SEQ ID NO: 2093 - protein, 246 aa, Shigella flexneri; identical to SEQ ID NO: 1265

SEQ ID NO: 2094 - protein, 243 aa, Mycobacterium tuberculosis
MPNFWALPPEINSTRIYLGPGSGPILAAAQGWNALASELEKTKVGLQSALDTLLESYRGQSSQALIQQTLPYVQWLTTTAEHAHKTAIQLTAAANAYEQARAAMVPPAMVRANRVQTTVLKAINWFGQFSTRIADKEADYEQMWFQDALVMENYWEAVQEAIQSTSHFEDPPEMADDYDEAWMLNTVFDYHNENAKEEVIHLVPDVNKERGPIELVTKVDKEGTIRLVYDGEPTFSYKEHPKF

SEQ ID NO: 2095 - protein, 450 aa, Escherichia coli; identical to SEQ ID NO: 1311

SEQ ID NO: 2096 - protein, 160 aa, Dichelobacter nodosus
MKSLQKGFTLIELMIVVAIIGILAAIAIPQYQNYIARSQVSRVMSETGQMRTAIETCLLDGKKADECFIGWTKSNLLGASGSPSSSNDSTADHPGQGGLVIDYKLEADATNAITATFGQNAAATLHGKALKWTRDPKATWSCSTDVELKFRPTGCKDDLK

SEQ ID NO: 2097 - protein, 345 aa, Plesiomonas shigelloides
MDIYMSRYEEITQQLIFSPKTWLITGVAGFIGSNLLEKLLKLNQVVIGLDNFSTGHQYNLDEVKTLVSTEQWSRFCFIEGDIRDLTTCEQVMKGVDHVLHQAALGSVPRSIVDPITTNATNITGFLNILHAAKNAQVQSFTYAASSSTYGDHPALPKVEENIGNPLSPYAVTKYVNEIYAQVYARTYGFKTIGLRYFNVFGRRQDPNGAYAAVIPKWTAAMLKGDDVYINGDGETSRDFCYIDNVIQMNILSALAKDSAKDNIYNVAVGDRTTLNELSGYIYDELNLIHHIDKLSIKYREFRSGDVRHSQADVTKAIDLLKYRPNIKIREGLRLSMPWYVRFLKG

SEQ ID NO: 2098 - protein, 155 aa, Rhodococcus erythropolis
MVMSEIQGQRIAFIQATWHRNIVDRARDGFTDAIVELGYPKDTVDFFEVPGAFEIPLHARRLAKTGRYQAIVAAGLVVDGGIYRHDFVATAVIDGLMRVQLDTDVPVFSVVLTPHHFHEHAEHVDYFSTHFVKKGAEAARAVDATVKSLKALPTS

SEQ ID NO: 2099 - protein, 288 aa, Staphylococcus aureus
MKKIKKAIIPAAGLGTRFLPATKAMPKEMLPILDKPTIQYIVEEAARAGIEDIIIVTGRHKRAIEDHFDSQKELEMVLKEKGKSELLEKVQYSTELANIFYVRQKEQKGLGHAISSARQFIGNEPFVVLLGDDIVESEVPAVKQLIDVYEETGHSVIGVQEVPEADTHRYGIIDPLTKNGRQYEVKKFVEKPAQGTAPSNLAIMGRYVLTPEIFDYLKTQKEGAGNEIQLTDAIERMNNDNQVYAYDFEGERYDVGEKLGFVKTTIEYALKDDSMREELTRFIKELGL

SEQ ID NO: 2100 - protein, 388 aa, Escherichia coli
MINYPLASSTWDDLEYKAIQSVLDSKMFTMGEYVKQYETQFAKTFGSKYAVMVSSGSTANLLMIAALFFTKKPRLKKGDEIIVPAVSWSTTYYPLQQYGLRVKFVDIDINTLNIDIESLKEAVTDSTKAILTVNLLGNPNNFDEINKIIGGRDIILLEDNCESMGATFNNKCAGTFGLMGTFSSFYSHHIATMEGGCIVTDDEEIYHILLCIRAHGWTRNLPKKNKVTGVKSDDQFEESFKFVLPGYNVRPLEMSGAIGIEQLKKLPRFISVRRKNAEYFLDKFKDHPYLDVQQETGESSWFGFSFIIKKDSGVIRKQLVENLNSAGIECRPIVTGNFLKNTDVLKYFDYTVHNNVDNAEYLDKNGLFVGNHQIELFDEIDYLREVLK

SEQ ID NO: 2101 - protein, 288 aa, Bartonella henselae
MMRILKTLFLAFIAAISCYTTPSFAETAPVSARKDNRIRFVNYDPYNVTKIIGSIRSSVQLEFADDEEVTYVGIGNSVAWQVAPAGHFVFLKPREVQPVTNLQIVTSRQDGTKRSYQFELQVREGDVSAGNDTYFLVKFRYPEDEALRKKLAEAAKAAQREENFVNDIFNTHEDFGPRNWAYEAQGSPLIEPASVYDNGKTTTFTFLGNTEIPAIYLVSLDGQEALVPKTIKGNKVIVHATAAQFTLRRGNDVLCIFNKRFVPAGVNPETGTTSPSVQRKVNIGNGYE

SEQ ID NO: 2102 - protein, 338 aa, Mycobacterium bovis; identical to SEQ ID NO: 1402

SEQ ID NO: 2103 - protein, 423 aa, Aeromonas hydrophila
MSYQRRHSRWYERVLFSPPSLFFLGAMLAVCLPALERWGWGFWEYFDAVRVNTLGGAFVAFLLTGIVLYRFLRYPGASPVAYMIPTVTTLYGSLVGALFFLRLPYSRQVLFESYVVALLCCWVVYFIGRRYRTPKYALLPFGDYQPLMHHTCVEWRLLDKPDLGAVRYDAVVADLRDDDLAGEWERFLARCALAHIPVYHIKQISETLTGRVKIDHLHENQLGSLLPSPIYAFIKRGMDILAAVIAIPLFSPLMLATAVLIKLESPGPVMFLQNRVGKGNRDFRIYKFRSMCQNSEQHGAQFAQDGDMRVTRVGKVIRKLRIDELPQFFNVLKGDMSLIGPRPEQRTFVDQFDREIPFYMYRHIVRPGISGWAQVVHGYAADADDTRIKIEHDFYYIKNFSLWLDVLIVFKTIRTILTGFGAR

SEQ ID NO: 2104 - protein, 324 aa, Yersinia pestis
MIRAYEQNPQHFIEDLEKVRVEQLTGHGSSVLEELVQLVKDKNIDISIKYDPRKDSEVFANRVITDDIELLKKILAYFLPEDAILKGGHYDNQLQNGIKRVKEFLESSPNTQWELRAFMAVMHFSLTADRIDDDILKVIVDSMNHHGDARSKLREELAELTAELKIYSVIQAEINKHLSSSGTINIHDKSINLMDKNLYGYTDEEIFKASAEYKILEKMPQTTIQVDGSEKKIVSIKDFLGSENKRTGALGNLKNSYSYNKDNNELSHFATTCSDKSRPLNDLVSQKTTQLSDITSRFNSAIEALNRFIQKYDSVMQRLLDDTR

SEQ ID NO: 2105 - protein, 389 aa, Escherichia coli
MQGNALTVLLSGKKYLLLQGPMGPFFSDVAEWLESLGRNAVNVVFNGGDRFYCRHRQYLAYYQTPKEFPGWLRDLHRQYDFDTILCFGDCRPLHKEAKRWAKAKGIRFLAFEEGYLRPQFITVEEGGVNAYSSLPRDPDFYRKLPDMPTPHVENLKPSTMKRIGHAMWYYLMGWHYRHEFPRYRHHKSFSPWYEARCWVRAYWRKQLYKVTQRKVLPRLMNELDQRYYLAVLQVYNDSQIRNHSSYNDVRDYINEVMYSFSRKAPKESYLVIKHHPMDRGHRLYRPLIKRLSKEYGLGERILYVHDLPMPELLRHAKAVVTINSTAGISALIHNKPLKVMGNALYDIKGLTYQGHLHQFWQADFKPDMKLFKKFRGYLLVKTQVNAVYY

SEQ ID NO: 2106 - protein, 102 aa, Chlamydophila caviae
MSDQATTLRIKPLGDRILVKREEEDSTARGGIILPDTAKKKQDRAEVLVLGTGKRDKDGNVLPFEVTVGDTVLIDKYAGQELTVDGEEYVIVQESEVMAVLK

SEQ ID NO: 2107 - protein, 161 aa, Escherichia coli
MKKLAIIGATSVMMMTGTAQANFTSSGTNGKVDLTITEECRVTVESKSESFLRSGLVANRHITNLGIQSTGCGTGQRVALKLGAGSYDDTNGAHMTHENGTDKLLVSMGSATGDGTQDGGVYYINRDGNWNGQMVFIVRNDQQHLPTGKYTLNLEGGFWTK

SEQ ID NO: 2108 - protein, 1604 aa, Rickettsia felis
MSLQNSHSKKYVLTFFMSTCLLTSSFLSTSARAASFTQLANQIPTLSGLSEVQRKQKWNSYTLQEKQEAWRRAKLTPDFVQAMIDMQTGFTESDLSSRNNKTRHKAREKKSELDLYIAGTKQGFKEKVDGYISQGKIPTPEEAAQNLEIDYDAKKTDNKLEKNQNVRRVEKDKKALLDLYIHSITTSVKEKEYITTGQVPELGELEKALNISKEEAKHRRTIIRDQVMANERPKLVRSGTVLTKKELHKRFGKDTTTDDTKYIDDITTEVMYTKKQGYVNTDFLPKISEIMNEFKVDKGRANLYLNQIKAGIEAKLLADNNQTTTKPFTKHSRTTTNTAGISSGVPFDTGRTKPETKSFDFKRSMYSLLNRKQEDQLSKTEQHLKQQIKLEENKEEFKEILTKNPIDALLFAEQSNLGNSFKQEAISNIDLSKDISRILFTVDDKGNRTILNTILTTTPEHKDELIKQAQHHAIQTLPTSISDKDVSDKKKLTLATLAATEDKKVLEEALDNWLSTNGYKRKPEVESLISILLSDETTLKAGIDKIFELPVENNVNNNSNKGQNGTPILPPTPPLNGSMPPSPPPPLLNGTPTSTAFNNSNPNHKFDLKNFEATYPRLYKSYNEFIQNTTSASQSQATTTSNNIPDTKAKMGESLELLKQKVAKQNEVIGLIHNEVTKLYNFSPKTFVNLFNTENEEIIKKIEQIAKREDIQKILQDNDIKITSTFVSKIFNESLEQTKQRLRSSNIINAKQYKRIEQYANKQECVTEFLRITNPLEQLKFANKYINILGQSTFNGKLNELIENPNKLTFSQKINFVLQGYQELTREIPTAKANLNKLKQNILEKIEIQQLIANKDISRKDLLDILNNKNPELLKSLLEAKVILEENKLNNSANEVDLKEIIPSLNYLTSEQLTSLINRITIEGVKTALKAKWQQENKTVSNNTEKPLIYNNGTPMPPPIPNGNSNFGTNDYLISMGYTQEFIDRMDKVKPNNNFGKNHNYTATDFKSNVGKNYYESTSKLGGTDILLTDSQKLENAIKKEVLAKYIEEPNRDMQDDSLLKQAFEEKFYYAEDKNTKVIPKPSEVNFDPNFIGPRTEVGQEIYELYEQELLKLARDPVFIEYVKNNNNTQKDERELLISFIEQIESKRPELEQKYGSDVQSEDNNQEKKVGHLNMKQFQSLFQQENESANDESSTKDDPQPEDSNKKSEKSDSETALSPRLLSSNDSKNDKSSDDKKSLLVLRSSEEESKKDIALESEDEAIDMSFKTEAIAEQDEATQRQQVSDDTNRKVAILVKATSTLHKPVHYNILSDRLKVAAIGAGDEEASINRGVWISGLYGINKQGTWKNIPKYQGRTTGVTIGADAEFINSHDVIGIAYSRLEFQIKYNKKLEKTAVNGHLLSIYGLKELIKGFSLQAITSYGHNYIKNKSKSINNIIGKYQNNNLSFQTLLNYKYRTKYDLHFIPNIGFKYDYSRASNYKEYNVDIENLMNQKKSNQSFESSIGGKIVFKPIATVNNIILTPSLYGNIERHFNNKNTKVNAKATFKGQTLQETIIIPKQPKLGYNIGSNILMSKKNINVLLEYNYYTHRKYQSHQGLIKLKVNL

SEQ ID NO: 2109 - protein, 246 aa, Yersinia pestis; identical to SEQ ID NO: 1495

SEQ ID NO: 2110 - protein, 368 aa, Mycobacterium tuberculosis
MLWHAMPPELNTARLMAGAGPAPMLAAAAGWQTLSAALDAQAVELTARLNSLGEAWTGGGSDKALAAATPMVVWLQTASTQAKTRAMQATAQAAAYTQAMATTPSLPEIAANHITQAVLTATNFFGINTIPIALTEMDYFIRMWNQAALAMEVYQAETAVNTLFEKLEPMASILDPGASQSTTNPIFGMPSPGSSTPVGQLPPAATQTLGQLGEMSGPMQQLTQPLQQVTSLFSQVGGTGGGNPADEEAAQMGLLGTSPLSNHPLAGGSGPSAGAGLLRAESLPGAGGSLTRTPLMSQLIEKPVAPSVMPAAAAGSSATGGAAPVGAGAMGQGAQSGGSTRPGLVAPAPLAQEREEDDEDDWDEEDDW

SEQ ID NO: 2111 - protein, 452 aa, Salmonella gallinarum
MSLMQFSGLLVVWLLSTLFIATLTWFEFRRVRFNFNVFFSLLFLLTFFFGFPLTSVLVFRFDVGVAPPEILLQALLSAACFYGVYYVTYKTRLRKRVVDVPRKPLFTMNRVETHLTWVILMGIALVSVAIFFMHNGFLLFRLHSYSQIFSSEVSGVALKRFFYFFIPAMLVVYFLRQDSKAWLFFLVSTVAFGLLTYMIVGGTRANIIIAFAIFLFIGIIRGWISLWMLAAAGVLGIVGMFWLALKRYGLNVSGDEAFYTFLYLTRDTFSPWENLALLLQNYHNIDFQGLAPIVRDFYVFIPTWLWPGRPSIVLNSANYFTWEVLNNHSGLAISPTLIGSLVVMGGALFIPLGAIVVGLIIKWFDWLYELGNREPNRYKAAILHSFCFGAIFNMIVLVREGLDSFVSRVVFFLVVFGASLLVAKLLFWLFDSAGLIHKRTTSLPQAQVEGKL

SEQ ID NO: 2112 - protein, 214 aa, Neisseria gonorrhoeae
MNTLQKGFTLIELMIVIAIVGILAAVALPAYQDYTARAQVSEAILLAEGQKSAVTEYYLNHGIWPENNPAGVASPASDIKGKYVQSVTVANGVVTAQMKSDGVNKEIKNKKLSLWARREAGSVKWFCGQPVTRDNAGTDAVTADTTGKDKEIDTKHLPSTCRCFQIGSVKWFCGQPVTRDNAGTDAVTADTTGKDKEIDTKHLPSTCRDKSSAE

SEQ ID NO: 2113 - protein, 615 aa, Bacteroides thetaiotaomicron
MRTFLSLKTCLLSALLLCVNSIAASKIISVSDFGLKPDSRINAVPFIQKAIDACKQHPGSTLVFPKGRYDFWAQHAIEKDYYETNTYDVNPKILAVLLEQINDLTIDGNGSEFIMHGRMQPFTLDHCRNITLKNFSVDWEIPLTAQGIVTQSTSEYLEIEIDSHQYPYIIENKRLTFVGEGWKSSLWAIMQFDPDTHLVLPNTGDNLGWRSYDATEINPGLIRLSDPKKEADKFFPAPGTVLVLRHSTRDHAGIFIYHSMDTKLENVKLFHTCGLGILSQYSKNISFNDVHIIPNTSKKRVLSGHDDGFHFMGCSGLLKIENCSWAGLMDDPINIHGTCSRIMEVLSPTRIKCKFMQDMSEGMEWGRPDETIGFIEHKTMRTVATGKMNKFEALNKAEFIIELSVPLPAGVEAGYVIENLTCTPDAEIRNCHFGSCRARGLLVSTPGKVIIENNVFESSGSAILIAGDANAWYESGAVKDVLIRNNDFRYPCNSSIYQFCEAVISIDPEIPTPEQKYPYHRNIRIMDNTFHLFDYPILFARSVNGLTFSSNTLIRDTTYQPYHYRKEGITLEACKSVVISNNKIEGDVLGRIVTIEKMKPSDVKISKNPFFKLKK

SEQ ID NO: 2114 - protein, 399 aa, Salmonella muenchen
MLPFPPGAILRDVLNVFFVALVLVRFVIDRKKTYFPLVFTIFSWSAVILWVIALTIFSPDKIQAIMGGRSYILFPAVFIALVILKVSYPQSLNIEKIVCYIIFLMFMVATISIIDVLMNGEFIKLLGYDEHYAGEQLNLINSYDGMVRATGGFSDALNFGYMLTLGVLLCMECFSQGYKRLLMLIISFVLFIAICMSLTRGAILVAALIYALYIISNRKMLFCGITLFVIIIPVLAISTNIFDNYTEILIGRFTDSSQASRGSTQGRIDMAINSLNFLSEHPSGIGLGTQGSGNMLSVKDNRLNTDNYFFWIALETGIIGLIINIIYLASQFYSSTLLNRIYGSHCSNMHYRLYFLFGSIYFISAALSSAPSSSTFSIYYWTVLALIPFLKLTNRRCTR

SEQ ID NO: 2115 - protein, 288 aa, Staphylococcus aureus; identical to SEQ ID NO: 1891

SEQ ID NO: 2116 - protein, 96 aa, Legionella pneumophila
MKIRPLHDRVVVRRMEEERTTAGGIVIPDSATEKPMRGEIIAVGAGKVLENGDVRALAVKVGDVVLFGKYSGTEVKVDGKELVVMREDDIMGVIEK

SEQ ID NO: 2117 - protein, 107 aa, Bartonella henselae
MTDTISRNIIFIIIMLLLTALVVSDPSYAAAATGSASGLGNVDNVLQSIVTMMTGTTAKLIATICVAAVGIGWMYGFIDLRKAAYCLIGIGIVFGASALVSKLTSAS

SEQ ID NO: 2118 - protein, 209 aa, Coxiella burnetii
MSEVNPKIVIEAALFASAEPLTPERLQQLFDEQNPISLSEIKNLLSELKEDYRERGVDLQEVASGYRFQARPDFSPWLQRLWEKKPARYSRALLETLALIVYRQPISRGEIEEVRGVAVSSDIIKKLLDREWISVVAHRDVPGKPALFGTTKTFLDYFNLKSLEELPPLEDVVDLEKIEAQFGEQLALVVEKKAAEGTEPSALPLAEED

SEQ ID NO: 2119 - protein, 246 aa, Salmonella typhi
MTNNAAAPLYSLRGLPLIGWRDMSHALNYLFADGQLKQGTLVAINAEKLLTAEDNPEVRALIAAAEFKYADGISVVRSIRKKFPQAQVSRVAGADLWEALMARAGKEGTPVFFVGGKPEVLAQTEAKLRTQWNVNIVGSQDGYFTPEQRQALFARIHASGAKIVTVAMGSPKQELLMRDCREVHPHALYMGVGGTYDVFTGHVKRAPKIWQNLGLEWLYRLLSQPKRITRQMRLLRYLRWHYTGDL

SEQ ID NO: 2120 - protein, 737 aa, Yersinia pestis
MLKKILPVLITLAIVHNTPTAWAAEAPKTDSFYLPKSLDLSPLRLHNIESNPYGKDFNYAQQFKTLDLEAVKKDIKTVLTTSQDWWPADYGNYGPFFIRMAWHGAGTYRIYDGRGGADGGQQRFEPLNSWPDNANLDKARRLLWPIKKKYGAKISWGDLMVLTGNVALESMGFKTLGFAGGREDDWQSDLVYWGAGNKMLSDNRDKNGKLPKPLAATQMGLIYVNPEGPNGKPDPVAAAKDIREAFARMAMNDEETVALIAGGHTFGKAHGAASPEKCLGAAPGEAGLEQQGLGWANKCGSGNGKDTITSGLEGAWTTDPTHFTMQYLSNLYKHEWVLTKSPAGAWQWKPKNAANVVPDATDPTKFHPLMMFTTDIALKVDPEYKKITTRFLENPEEFKMAFARAWFKLTHRDMGPAARYLGDEVPKETFIWQDPLPAANYKMIDSADISELKDKILKTGLSDTKLIKTAWASASTFRGTDFRGGDNGARIRLAPQKDWPVNDPAELHSVLAALMEVQNNFNKDRSDGKKVSLSDLIVLGGNAAIEDAAKKAGYSISIPFTPGRTDASQEETDVSSFAVLEPTADGFRNYYDAKRNTLSPIASLIDRANKLELTVPEMTVLIGGLRVLDVNSGGSKAGVLTNTPGQLNNNFFVNLLDMSTKWTKSPKAEGYFDGYDRKTGKLKWTASSVDLVFGSNPELRAVAEVYASDDAKEKFVHDFTKVWEKVMNLDRFDIKNN

SEQ ID NO: 2121 - protein, 953 aa, Mannheimia haemolytica [sequence omitted]

SEQ ID NO: 2122 - protein, 544 aa, Treponema pallidum
MAKQLLFNEEARKKLLSGVEQISSAVKVTLGPKGRNVLLEKGYGAPTVTKDGVSVAKEVELEDPFENMGAQLLKEVATKTNDVAGDGTTTATVLAYSMVREGLKAVAAGMTPLELKRGMDKAVAIAVDDIKQNSKGIKSNEEVAHVASVSANNDKEIGRILASAIEKVGNDGVIDVDEAQTMETVTEFVEGMQFDRGYISSYFVTDRDRMETVYENPYILIYDKSISTMKDLLPLLEKIAQTGRPLLIIAEDVEGEALATLVVNSLRGTLKTCAVKAPGFGDRRKEMLEDIAILSGGQVISEDLGLKLESADIALLGQAKSVKVDKENTTIIDGSGKSKDIKDRIEQIKKQIEASTSDYDSEKLKERLAKLSGGVAVIKIGAVTEVEMKEKKHRVEDALNATRAAIEEGIVAGGGLALIQAAAALEKADLSGLTPDEAVGFKIVRRALEEPIRQISENAGIDGAVVAEKAKEKRGIGFDASKMEWVDMIKVGIIDPAKVTRSALQNAASVSGLLLTTECAIAAIPEKSSSTPPAPDMGGMGGMY

SEQ ID NO: 2123 - protein, 1286 aa, Escherichia coli
MNKAYSIIWSHSRQAWIVASELARGHGFVLAKNTLLVLAVVSTIGNAFAVNISGTVSSGGTVSSGETQIVYSGRGNSNATVNSGGTQIVNNGGKTTATTVNSSGSQNVGTSGATISTIVNSGGIQRVSSGGVASATNLSGGAQNIYNLGHASNTVIFSGGNQTIFSGGITDSTNISSGGQQRVSSGGVASNTTINSSGAQNILSEEGAISTHISSGGNQYISAGANATETIVNSGGFQRVNSGAVATGTVLSGGTQNVSSGGSAISTSVYNSGVQTVFAGATVTDTTVNSGGNQNISSGGIVSETTVNVSGTQNIYSGGSALSANIKGSQIVNSEGTAINTLVSDGGYQHIRNGGIASGTIVNQSGYVNISSGGYAESTIINSGGTLRVLSDGYARGTILNNSGRENVSNGGVSYNAMINTGGNQYIYSDGEATAAIVNTSGFQRINSGGTAPVQNSVVVTRTVSSAAKPFDAEVYSGGKQTVYLWRGIWYSNFLTAVWSMFPGTASGANVNLSGRLNAFAGNVVGTILNQEGRQYVYSGATATSTVGNNEGREYVLSGGITDGTVLNSGGLQAVSSGGKASATVINEGGAQFVYDGGQVTGTNIKNGGTIRVDSGASALNIALSSGGNLFTSTGATLPELTTMAALSVSQNHASNIVLENGGLLRVTSGGTATDTTVNSAGRLRIDDGGTINGTTTINADGIVAGTNIQNDGNFILNLAENYDFETELSGSGVLVKDNTGIMTYAGTLTQAQGVNVKNGGIIFDSAVVNADMAVNQNAYINISDQATINGSVNNNGSIVINNSIINGNITNDADLSFGTAKLLSATVNGSLVNNKNIILNPTKESAGNTLTVSNYTGTPGSVISLGGVLEGDNSLTDRLVVKGNTSGQSDIVYVNEDGSGGQTRDGINIISVEGNSDAEFSLKNRVVAGAYDYTLQKGNESGTDNKGWYLTSHLPTSDTRQYRPENGSYATNMALANSLFLMDLNERKQFRAMSDNTQPESASVWMKITGGISSGKLNDGQNKTTTNQFINQLGGDIYKFHAEQLGDFTLGIMGGYANAKGKTINYTSNKAARNTLDGYSVGVYGTWYQNGENATGLFAETWMQYNWFNASVKGDGLEEEKYNLNGLTASAGGGYNLNVHTWTSPEGITGEFWLQPHLQAVWMGVTPDTHQEDNGTVVQGAGKNNIQTKAGIRASWKVKSTLDKDTGRRFRPYIEANWIHNTHEFGVKMSDDSQLLSGSRNQGEIKTGIEGVITQNLSVNGGVAYQAGGHGSNAISGALGIKYSF

SEQ ID NO: 2124 - protein, 1028 aa, Rickettsia africae
MRGFMSKDGNLDTSEFDTLANKEYTAEQKQTLEQGQKEFLSQTTTPELEADDGFIVTSASFAQSTPSMSALSGNISPDSQTSDPITKAVRETIIQPQKDNLIEQILKDLAALTDRDLAEQKRKEIEEEKEKDKTLSTFFGNPANREFIDKALDNPELKKKLESIEIAGYKNVHNTFSAASGYPGGFKPVQWENHVSASDLRATVVKNDAGDELCTLNETTVKTKPFTLAKQDGTQVQISSYREIDFPIKLDKADGSMHLSMVALKADGTKPSKDKAVYFTAHYEEGPNGKPQLKEISSPKPLKFAGTGDDAIAYIEHGGEIYTLAVTRGKYKEMMKEVELNQGQSVDLSQAEDIIIGQGQSKEQPLITPQQTTSSSVEPPQYKQQVPPITPTNQPLQPETSQMQQSQQVTPNLLNTATALSGSMQDLLNYVNAGLTKEIDSNKQIDLIKEAATAILNNEKSDIAEKQANIIALAENTVNNKNLKPDAKVAGVNAILETIKNDQNTPNLEKSKMLEATVAIVLNSENLESKQKQQMLEKAVDVGLSLKDDASRAATIDGIKDVVIKSNLSTEDKGTMLIAVGDKVNVSELSNAEKQKLLGSVLKKDVEAQVLSPAQQQLMQQHLDKITAEQTKKDTIKKVNDILFDPLSNTELKTTNIQAITSNVLDGPATAEVKGEIIQEITNTVAGSSLEAQDKAAIIKGVGETIATHSDTSLSLPNKALIMASAEKGIAESQTNLPDRELMTKGLVDGIYEGKGGPEITKAVSSGIDNSNINDSEKEALKKAKDAASEAALDRDTQNLTEGLKGQNIEEHKPHDDIYNKAREVINAVNPVIEALEKSKEPVVSAEDRIVQETSSILNNISKLAVEKVNNLRAMLSPNGNLKTLEEKKEESIKKVDELVKAFGTKSSTEEQQSFIKTNLIDDKTLSKEVRLQTIDKLLQEQKRAEAIENPSVKTEDVRVVSGKSKLKPISKDNPDIEKAKMVVGRDRVNIKGNIKIMGALMNARDIIQSENLNKSIPIKRESSPPQR

SEQ ID NO: 2125 - protein, 359 aa, Escherichia coli
MTVLIHVLGSDIPHHNRTVLRFFNDALAATSEHAREFMVVGKDDGLSDSCPALSVQFFPGKKSLAEAAIAKAKANRQQRFFFHGQFNPKLWLALLSGGIKPSQFFWHIWGADLYELSSGLRYKLFYPLRRLAQKRVGCVFATRGDLSFFAKTHPKVRGELLYFPTRMDPSLNTMANDRQREGKMTILVGNSGDRSNDHIAALCAVHQQLGDTVKVVVPMGYPPNNEAYIEEVRQAGLELFSEENLQILSEKLEFDAYLALLRQCDLGYFIFARQQGIGTLCLLIQAGIPCVLNRENPFWQDMTEQHLPVLFTTDDLNEDIVREAQRQLASVDKNTIAFFSPNYLQGWQRALAIAAGEVA

SEQ ID NO: 2126 - protein, 310 aa, Mycobacterium bovis
MIQIARTWRVFAGGMATGFIGVVLVTAGKASADPLLPPPPIPAPVSAPATVPPVQNLTALPGGSSNRFSPAPAPAPIASPIPVGAPGSTAVPPLPPPVTPAISGTLRDHLREKGVKLEAQRPHGFKALDITLPMPPRWTQVPDPNVPDAFVVIADRLGNSVYTSNAQLVVYRLIGDFDPAEAITHGYIDSQKLLAWQTTNASMANFDGFPSSIIEGTYRENDMTLNTSRRHVIATSGADKYLVSLSVTTALSQAVTDGPATDAIVNGFQVVAHAAPAQAPAPAPGSAPVGLPGQAPGYPPAGTLTPVPPR

SEQ ID NO: 2127 - protein, 450 aa, Shigella boydii
MSLLQFSGLFVVWLLCTLFIATLTWFEFRRVRFNFNVFFSLLFLLTFFFGFPLTSVLVFRFDVGVAPPEILLQALLSAGCFYAVYYVTYKTRLRKRVADVPRRPLFTMNRVETNLTWVILMGIALVSVGIFFMHNGFLLFRLNSYSQIFSSEVSGVALKRFFYFFIPAMLVVYFLRQDSKAWLFFLVSTVAFGLLTYMIVGGTRANIIIAFAIFLFIGIIRGWISLWMLAAAGVLGIVGMFWLALKRYGMNVSGDEAFYTFLYLTRDTFSPWENLALLLQNYDNIDFQGLAPIVRDFYVFIPSWLWPGRPSMVLNSANYFTREVLNNHSGLAISPTLIGSLVVMGGALFIPLGAIVVGLIIKWFDWLYELGNREPNRYKAAILHSFCFGAIFNMIVLAREGLDSFVSRVVFFIVVFGACLMIAKLLYWLFESAGLIHKRTKSSLRTQVEG

SEQ ID NO: 2128 - protein, 180 aa, Neisseria gonorrhoeae
MNTLQKGFTLIELMIVIAIVGILAAVALPAYQDYTARAQVSEAILLAEGQKSAVTEYYLNHGKWPENNTSAGVASPPSDIKGKYVKEVKVENGVVTATMNSSGVNKEIQGKRLSLWGRRENGSVKWFCGQPVTRAKADADADAAGKDTTNIDTKHLPSTCRDAASAVCIETPPTAFYKNT

SEQ ID NO: 2129 - protein, 444 aa, Elizabethkingia meningoseptica
MGALIPSSTLFNIFDFNPKKVRIAFIAVGLRGQTHVENMARRDDVEIVAFADPDPYMVGRAQEILKKNGKKPAKVFGNGNDDYKNMLKDKNIDAVFVSSPWEWHHEHGVAAMKAGKIVGMEVSGAITLEECWDYVKVSEQTGVPLMALENVCYRRDVMAILNMVRKGMFGELVHGTGGYQHDLRPVLFNSGINGKNGDGVEFGEKAFSEAKWRTNHYKNRNGELYPTHGVGPLHTMMDINRGNRLLRLSSFASKARGLHKYIVDKGGESHPNAKVEWKQGDIVTTQIQCHNGETIVLTHDTSLQRPYNLGFKVQGTEGLWEDFGWGEAAQGFIYFEKIMNHSHRWDSSEKWIKEYDHPMWKKHEQKAVGAGHGGMDYFLDNTFVECIKRNEAFPLDVYDLATWYSITPLSEKSIAENGAVQEIPDFTNGKWKNAKNTFAINDDY

SEQ ID NO: 2130 - protein, 158 aa, Brucella abortus biovar; identical to SEQ ID NO: 2082

SEQ ID NO: 2131 - protein, 214 aa, Borrelia hermsii
MRKRISAIIMTLFMVFMSCNNGGPELKSDEVAKSDGTVLDLAKISAKIKEASAFAASVKEVHTLVKSVDTLAGAIGKKIKSDGKFDAMAGKNGSLLAGAYNVALDINSKLTVLDGKAGLSSLLKAKVTAAKTSGESFSNKLKTEHTDLGKEEASDDNAKAALLVTNATKNKGVTELEALNTAVDALLKAAEGEVEAAIKELTAPVKVEKPSQNN

SEQ ID NO: 2132 - protein, 540 aa, Mycobacterium bovis; identical to SEQ ID NO: 1338

SEQ ID NO: 2133 - protein, 103 aa, Bartonella quintana
MNEDTLFLACTRPATFAGVTMEGMALNVMATSILFILTSNFTMIGLGIGLHFVLREVTKYDHNQFRVLFAWLNTRGKQKNLTRWGGGSTSPLRLIRTYKELNR

SEQ ID NO: 2134 - protein, 862 aa, Bacillus anthracis
MAKTNSYKKVIAGTMTAAMVAGIVSPVAAAGKSFPDVPAGHWAEGSINYLVDKGAITGKPDGTYGPTESIDRASAAVIFTKILNLPVDENAQPSFKDAKNIWSSKYIAAVEKAGVVKGDGKENFYPEGKIDRASFASMLVSAYNLKDKVNGELVTTFEDLLDHWGEEKANILINLGISVGTGGKWEPNKSVSRAEAAQFIALTDKKYGKKDNAQAYVTDVKVSEPTKLTLTGTGLDKLSADDVTLEGDKAVAIEASTDGTSAVVTLGGKVAPNKDLTVKVKNQSFVTKFVYEVKKLAVEKLTFDDDRAGQAIAFKLNDEKGNADVEYLNLANHDVKFVANNLDGSPANIFEGGEATSTTGKLAVGIKQGDYKVEVQVTKRGGLTVSNTGIITVKNLDTPASAIKNVVFALDADNDGVVNYGSKLSGKDFALNSQNLVVGEKASLNKLVATIAGEDKVVDPGSISIKSSNHGIISVVNNYITAEAAGEATLTIKVGDVTKDVKFKVTTDSRKLVSVKANPDKLQVVQNKTLPVTFVTTDQYGDPFGANTAAIKEVLPKTGVVAEGGLDVVTTDSGSIGTKTIGVTGNDVGEGTVHFQNGNGATLGSLYVNVTEGNVAFKNFELVSKVGQYGQSPDTKLDLNVSTTVEYQLSKYTSDRVYSDPENLEGYEVESKNLAVADAKIVGNKVVVTGKTPGKVDIHLTKNGATAGKATVEIVQETIAIKSVNFKPVQTENFVEKKINIGTVLELEKSNLDDIVKGINLTKETQHKVRVVKSGAEQGKLYLDRNGDAVFNAGDVKLGDVTVSQTSDSALPNFKADLYDTLTTKYTDKGTLVFKVLKDKDVITSEIGSQAVHVNVLNNPNL

SEQ ID NO: 2135 - protein, 246 aa, Serratia proteamaculans
MEAKISVPKYELRGFSLWGFRDMAQCMDFLFDGGRVKRGTLVAMNAEKILTAEQDTELHALLDEAEYKYADGISMVRSIRRKYPGADVSRVAGADLWEALMQRAGREGTPVFLIGGKPSVLAETEQKLRSQWNVNLVGSQDGYFKPEQREPLFERIRASGAAIVTVAMGSPKQEILMRDCRKVHPQALYMGVGGTYDVFTGHVKRAPKVWQNLGLEWLYRLLSQPSRLGRQLRLLKFVSYYYRGKM

SEQ ID NO: 2136 - protein, 95 aa, Yersinia pestis
MKSSHFDEYDKTLKQAELAIADSDHRAKLLQEMCADIGLTPEAVMKIFAGRSAEEIKPAERELLDEIKRQRERQPQHPYDGKRPRKPTMMRGQII

SEQ ID NO: 2137 - protein, 633 aa, Shigella flexneri
MHNVNNTQAPTFLYKATSPSSTEYSELKSKISDIHSSQTSLKTPASVSEKENFATSFNQKCLDFLFSSSGKEDVLRSIYSNSMNAYAKSEILEFSNVLYSLVHQNGLNFENEKGLQKIVAQYSELIIKDKLSQDSAFGPWSAKNKKLHQLRQNIEHRLALLAQQHTSGEALSLGQKLLNTEVSSFIKNNILAELKLSNETVSSLKLDDLVDAQAKLAFDSLRNQRKNTIDSKGFGIGKLSRDLNTVAVFPELLRKVLNDILEDIKDSHPIQDGLPTPPEDMPDGGPTPGANEKTSQPVIHYHINNDNRTYDNRVFDNRVYDNSYHENPENDAQSPTSQTNDLLSRNGNSLLNPQRALVQKVTSVLPHSISDTVQTFANNSALEKVFNHTPDNSDGIGSDLLTTSSQERSANNSLSRGHRPLNIQNSSTTPPLHPEGVTSSNDNSSDTTKSSASLSHRVASQINKFNSNTDSKVLQTDFLSRNGDTYLTRETIFEASKKVTNSLSNLISLIGTKSGTQERELQEKSKDITKSTTEHRINNKLKVTDANIRNYVTETNADTIDKNHAIYEKAKEVSSALSKVLSKIDDTSAELLTDDISDLKNNNDITAENNNIYKAAKDVTTSLSKVLKNINKD

SEQ ID NO: 2138 - protein, 546 aa, Tatlockia micdadei
MAKELRFGDDARQQMLAGVNALADAVKATMGPSGRNVVLERSFGAPTVTKDGVSVAKEIEFENRFKNMGAQMVKEVAAKTSDTAGDGTTTATVLARAIVVEGHKAVAAGMNPMDLKRGIDKAVAAVTKKLQEMSKPCKDGKAIAQVGTISANSDQAIGSIIAEAMEKVGKEGVITVEDGNSLENELAVVEGMQFDRGYISPYFINNQQNMSAELEHPFILLVDKKISTIRDMLSVLEAVAKSGPSLLIIAEDVEGEALATLVVNNMRGIVKVCAVKAPGFGDRRKAMLQDIAILTAGEVISEEVGTSLESATLDSLGTAKRVVVTKENTTIIDGEGKAADINARITQIRAQMEETTSDYDREKLQERVAKLAGGVAVIKLVLLPNRMKRKARVEDALHATRAAVEEGIVAGGGVALIRAQKALDGLKGENADQDMGINILRRAIESPLRQIVANAGYEPSVIVNKVAESKDNFGFNAATGEYGDMVEMGILDPTKVTRTALQNAASVASLMLTTECMVADLPKKEEPMGAGEMGGMGGMGGMGGMM

SEQ ID NO: 2139 - protein, 359 aa, Borrelia burgdorferi
MGVLDKIKPGVVYGKELHFLYEICKKEGFAIPSINCIGTNSINAVLEAAKEINSPIMIQFSNSGSAFISGKGLKMEKPQGVSIVGAISGAMHVHLMAEHYGVPVVLHTDHCAKNLLPWVEGLLEYGEKYYSQHKKPLFSSHMLDLSEEPIKENIEISKKFLERMAKIEMFLEIELGITGGEEDGVDNSDRALHELFSTPEDIYYGYSELLKVSPNFQIAAAFGNVHGVYKPGNVKLTPKVLKDGQDYVISKTGVNMAKPVSYVFHGGSGSTIDEINEALSYGVVKMNIDTDTQWAAWEGVLNYYKKNESRLQGQLGDGKDIDIPNKKFYDPRVWLREAEVSMKDRVKIACKNLNNINRN

SEQ ID NO: 2140 - protein, 1022 aa, Rickettsia conorii
MSKDGNLDTSEFDPLANKEYTEEQKQTLEQEQKEFLSQTTTPALEADDGFIVTSASFAQSTPSMSALSGNISPDSQTSDPITKAVRETIIQPQKDNLIEQILKDLAALTDRDLAEQKRKEIEEEKEKDKTLSTFFGNPANREFIDKALENPELKKKLESIEIAGYKNVHNTFSAASGYPGGFKPVQWENHVSANDLRATVVKNDAGDELCTLNETTVKTKPFTLAKQDGTQVQISSYREIDFPIKLDKADGSMHLSMVALKADGTKPSKDKAVYFTAHYEEGPNGKPQLKEISSPKPLKFAGTGDDAIAYIEHGGEIYTLAVTRGKYKEMMKEVELNQGQSVDLSQAEDIIIGQGQSKEQPLITPQQTTSSSVEPPQYKQQVPPITPTNQPLQPETSQMPQSQQVNPNLLNTATALSGSMQDLLNYVNAGLTKAIDSNKQIDLIKEAATAILNNEKSDIAEKQANIIALAENTVNNKNLKPDAKVTGVNAVLETIKNDQNTPNLEKSKMLEATVAIVLNSENLEPKQKQQMLEKAVDVGLSLKDDASRAAAIDGIKDVVIKSNLSPEDKMLIAVGDKVNVSELSNAEKQKLLGSVLKKGVEAQVLSPAQQQLMQQHLYKIMAEQTKKDTIKKVNDILFDPLSNTELKTTNIQAITSNVLDGPATAEVKGEIIQAITNTIAGSSLEAQDKAAIIKGVGETIATHSDTSLSLPNKALIMASAEKGIAESQTNLPDRELMTKGLVDGIYEGKGGPEITKAVSSGIDNSNINDSEKEALKKAKDAASEAALDRDTQNLTEGFKGQNIEEHKPHDDIYNKAREVINAVNPVIEALEKSKEPVVSAEERIVQETSSILNNISKLAVEKVNNFRAMLSPNGNLKTLEEKKEEAIKKVDELVKAFGTKSSTEEQQSFIKTNLIDDKTLSKEVRLQTIDKLLQEQKRSEAIENPSVKTEDVRVVSGKSKLKPISKDNPDIEKAKMVVGRDRVNIKGNIKIMGALMNARDIIQSENLNKSTPIKRESSPPQR

SEQ ID NO: 2141 - protein, 246 aa, Rickettsia conorii; identical to SEQ ID NO: 1495

SEQ ID NO: 2142 - protein, 287 aa, Bacillus anthracis
MKKAMLALAATSVIALSACGTSSSDKIVTSKAGDITKDEFYEQMKTQAGKQVLNNMVMEKVLIKNYKVEDKEVDKKYDEMKKQYGDQFDTLLKQQGIKEETLKTGVRAQLAQEKAIEKTITDKELKDNYKPEIKASHILVKDEATAKKVKEELGQGKSFEELAKQYSEDTGSKEKGGDLGFFGAGKMVKEFEDAAYKLKKDEVSEPVKSQFGYHIIKVTDIKEPEKSFEQSKADIKKELVAKKSQDGEFMNDLMMKEIKKADVKVDDKDLKDLFEEKKADAKKEEKK

SEQ ID NO: 2143 - protein, 450 aa, Shigella boydii; identical to SEQ ID NO: 2127

SEQ ID NO: 2144 - protein, 170 aa, Neisseria meningitidis
MNTLQKGFTLIELMIVIAIVGILAAVALPAYQDYTARAQVSEAILLAEGQKSAVTEYYLNHGEWPSNNTSAGVASSTDIKGKYVQSVEVKNGVVTATMASSNVNNEIKGKKLSLWAKRQDGSVKWFCGQPVKRNDTATTNDDVKADTAANGKQIDTKHLPSTCRDAASAG

SEQ ID NO: 2145 - protein, 331 aa, Escherichia coli
MNDNVLLIGASGFVGTRLLETAIADFNIKNLDKQQSHFYPEITQIGDVRDQQALDQALAGFDTVVLLAAEHRDDVSPTSLYYDVNVQGTRNVLAAMEKNGVKNIIFTSSVAVYGLNKHNPDENHPHDPFNHYGKSKWQAEEVLREWYNKAPTERSLTIIRPTVIFGERNRGNVYNLLKQIAGGKFMMVGAGTNYKSMAYVGNIVEFIKYKLKNVAAGYEVYNYVDKPDLNMNQLVAEVEQSLNKKIPSMHLPYPLGMLGGYCFDILSKITGKKYAVSSVRVKKFCATTQFDATKVHSSGFVAPYTLSQGLDRTLQYEFVHAKKDDITFVSE

SEQ ID NO: 2146 - protein, 359 aa, Salmonella typhimurium
MIDKNFWQGKRVFVTGHTGFKGSWLSLWLTEMGAIVKGYALDAPTVPSLFEIVRLNDLMESHIGDIRDFEKLRNSIAEFKPEIVFHMAAQPLVRLSYEQPIETYSTNVMGTVHLLETVKQVGNIKAVVNITSDKCYDNREWVWGYRENEPMGGYDPYSNSKGCAELVASAFRNSFFNPANYEQHGVGLASVRAGNVIGGGDWAKDRLIPDILRSFENNQQVIIRNPYSIRPWQHVLEPLSGYIVVAQRLYTEGAKFSEGWNFGPRDEDAKTVEFIVDKMVTLWGDDASWLLDGENHPHEAHYLKLDCSKANMQLGWHPRWGLTETLGRIVKWHKAWIRGEDMLICSKREISDYMSATTR

SEQ ID NO: 2147 - protein, 708 aa, Escherichia coli
MTKDLNTLVSELPEIYQTIFGHPEWDGDAARDCNQRLDLITEQYDNLSRALGRPLNVLDLGCAQGFFSLSLASKGATIVGIDFQQENINVCRALAEENPDFAAEFRVGRIEEVIAALEEGEFDLAIGLSVFHHIVHLHGIDEVKRLLSRLADVTQAVILELAVKEEPLYWGVSQPDDPRELIEQCAFYRLIGEFDTHLSPVPRPMYLVSNHRVLINDFNQPFQHWQNQPYAGAGLAHKRSRRYFFGEDYVCKFFYYDMPHGILTAEESQRNKHELHNEIKFLTQPPAGFDAPAVLAHGENAQSGWLVMEKLPGRLLSDMLAAGEEIDREKILGSLLRSLAALEKQGFWHDDVRPWNVMVDARQHARLIDFGSIVTTPQDCSWPTNLVQSFFVFVNELFAENKSWNGFWRSAPVHPFNLPQPWSNWLYAVWQEPVERWNFALLLALFEKKAKLPSAEQQRGATEQWIIAQETVLLELQSRGRNESAGSEALRGQIHTLEQQMAQLQSAQDAFVEKAQQPVEVSHELTWLGENMEQLAALLQTAQAHAQADVQPELPPETAELLQRLEAANREIHHLSNENQQLRQEIEKIHRSRSWRMTKGYRYLGLQIHLLRQYGFVQRCKHFIKRVLRFVFSFMRKHPQVKHTAVNGLHKLGLYQPAYRLYRRMNPLPHSQYQADAQILSQTELQVMHPELLPPEVYEIYLKLTKNK

SEQ ID NO: 2148 - protein, 540 aa, Mycobacterium tuberculosis; identical to SEQ ID NO: 1338

SEQ ID NO: 2149 - protein, 266 aa, Mycobacterium leprae
MPLTPADVHNVAFSKPPIGKRGYNEDEVDAFLDLVENELTQLIEENSDLRQRIEELDHELAAGGGTGAGPVIAVQPTQALSTFEPELVSAKQAPVAAVAETAEELAMKATRVLSLAQDTADQLTSTAKVESDKMLADARVNADQILGEARLTAEATVAEAQQRADAMLADAQTRSEVQSRQAQEKADALQAEAERKHSEIMGAISQQRTVLEGRLEQLRTFEREYRTRLKTYLESQLEELGQRGSAAPVDSNADAGGFDQFNRGNN

SEQ ID NO: 2150 - protein, 570 aa, Chlamydia muridarum
MPKQADYTWGAKKNLDTIACLPEDVKQFKDLLYAMHGFTATEEEPTSEVQPGAILKGTVVDISKDFVVVDVGLKSEGVIPMSEFIDSSEGLSVGAEVEVYLDQTEDEEGKVVLSREKATRQRQWEYILAHCEEGSIVKGQITRKVKGGLIVDIGMEAFLPGSQIDNKKIKNLDDYVGKVCEFKILKINVDRRNVVVSRRELLEAERISKKAELIEQITIGERRKGIVKNITDFGVFLDLDGIDGLLHITDMTWKRIRHPSEMVELNQELEVIILSVDKEKGRVALGLKQKEHNPWEDIEKKYPPGKRVRGKIVKLLPYGAFIEIEEGIEGLIHVSEMSWVKNIVDPNEVVNKGDEVEVVVLSIQKDEGKISLGLKQTEHNPWDNIEEKYPIGLRVTAEIKNLTNYGAFVELEPGIEGLIHISDMSWIKKVSHPSELFKKGNTVEAVILSVDKESKKITLGVKQLTPNPWDEIEAMFPVGSDISGIVTKITAFGAFVELQNGIEGLIHVSKLSDKPFAKIEDILSIGDKVSAKVIKLDPDHKKVSLSIKEFLAHGGHAGQDAEEETSSNRD

SEQ ID NO: 2151 - protein, 359 aa, Escherichia coli; identical to SEQ ID NO: 1797

SEQ ID NO: 2152 - protein, 95 aa, Yersinia pseudotuberculosis; identical to SEQ ID NO: 2136

SEQ ID NO: 2153 - protein, 220 aa, Mycobacterium bovis; identical to SEQ ID NO: 1979

SEQ ID NO: 2154 - protein, 548 aa, Neorickettsia sennetsu
MANEVISGEQLQRVIRDAADLVVSSAGVTLGPEGRPVIMSKSYGGPEVTKDGYKVMNQLKPEDEKVAKIVELLNQATSQANEKAGDGTTTATILVGNMIKNAHKHIAAQRSRMKLKSGMKRARDEVVKYIQSVAKKINSEEEIAQVGSISANGNSEIGGKIAEAMNKVGKEGVITVEEGKGLDEFSVSVVQGMVFDRGYVSPYFITNPEKMIVEFDNPYVLLANKKLSSIQPMVPLLETIVRSNRAVVIIAEDVEGEALTSLVLSKMRGSLKACAVKAPGFGDRRSEMLEDIRILTGAKTLVSDDLGVTVESLTVEDLGTAKSIIISKDSTTIVDGGGEKTAIEARVKQIKTQIDKTTSDYDKEKLQERLAKLAGGVAVLKVGGATEVEVKERKDRVEDALHATRAAVEEGIVPGGGATLLSAIAVLEKLSSDDDDEQAGINIVKTALKAPISQIVENAGEDASVITYNLLESKDPNRIFDARELKYVDAFKAGIIDPAKVVRVALESAVSVASVLVTTEALIVDLPTKDNGSSSMMPGGGMGGMGGF

SEQ ID NO: 2155 - protein, 411 aa, Streptococcus pyogenes
MTAQTPIHVYSEIGKLKKVLLHRPGKEIENLMPDYLERLLFDDIPFLEDAQKEHDAFAQALRDEGIEVLYLETLAAESLVTPEIREAFIDEYLSEANIRGRATKKAIRELLMAIEDNQELIEKTMAGVQKSELPEIPASEKGLTDLVESNYPFAIDPMPNLYFTRDPFATIGTGVSLNHMFSETRNRETLYGKYIFTHHPIYGGGKVPMVYDRNETTRIEGGDELVLSKDVLAVGISQRTDAASIEKLLVNIFKQNLGFKKVLAFEFANNRKFMHLDTVFTMVDYDKFTIHPEIEGDLRVYSVTYDNEELHIIEEKGDLAELLAANLGVEKVDLIRCGGDNLVAAGREQWNDGSNTLTIAPGVVVVYNRNTITNAILESKGLKLIKIHGSELVRGRGGPRCMSMPFEREDI

SEQ ID NO: 2156 - protein, 1039 aa, Rickettsia felis
MSKDSDNPGYESGYESDTEEKKQEQAVPAQPISSTANKDGNPDTSEFDPLANKEYTEEQKQKLEQEQKEYFSQTTPQELEADDGFSFTPASSTQSTPSISSLSGGISSDSQTSDPITKAVRETIIQPQKDEIAEQILKDLAALADRDLAEQKRKEIEEEKDKTLSAFFGNPANREFIDKALENPELKKKLESIEIAGYKNVLSTYSAANGYQGGFKPVQWENQISASDLRATVVRNDAGDELCTLNETTVKTKPFTVAKQDGTQVQINSYREIDFPIKLDKADGSMHLSMVALKADGTKPSKDKAVYFTAHYEEGPNGKPQLKEISSPKPLKFAGDGPDAVAYIEHGGEIYTLAVTRGKYKEMMREVELNQGQSVDLSQTIAEDLTKVQGRSQETPQPIITPNQELKSSIETPTTTQVPPITPANQPLQPETSQMPQPQQVNPNLLNAATALSTSMQDLLNYVNAGLTKEKDGNKQIDLINEAATAILNNEKSDIAEKQANIIALTENTVNNNDLTPDTKVAGVNAVLETIKNDQNTPDLEKSKMLEATVAIALNSENLEPKQKQQMLEKAVDVGLSLKDDASRVTAIDGITDAVIKSNLSTEDKGTMLIAVGDKVNASELSNAEKQKLLGSVLKKGVEAQVLSPEQQQLMQQNLDKITAEQTKNAQITEVQGILANPAFNTIAKTEAIQNVTTKVLDSPIKAEIKGETLESITKVVAESPLNGQDKADIVKGMGEAIASHKTMAPTEKISTIESVEKGVAESITDLEDKKLMTKGLVEGIYEGKANPEITSEKTKAVSRGIDKSTAIPEDKQALKDAANEAALDRETQNLTEGLKRQNLGEPKPRDDIYNKAQDVADALKNVITPVLDAHPEKREVSEEEEVVKKTSSILNDISKLAIEKVNNFRAMLSPDGNLKTLEEKKAESTKKVDELVKEFGTKSSTEEQQSFIKANLIDDKTLSKEIRLQTINKLLQEQAQKRAEAIENPNVKTEDVRVVSGVNIKDNIKIMGALMNARDSIIQSENLNKSTPIKRESSFPPR

SEQ ID NO: 2157 - protein, 359 aa, Escherichia fergusonii
MTVLIHVLGSDIPHHNQTVLRFFNDVLAATSENAREFMVVGKDDGLIDSCPALSVQFFPGKKSLAEAVIAKAKANRQQRFFFHGQFNPKLWLALLSGGIKPSQFYWHIWGADLYELSSGLRYKLFYPLRRLAQKRVGCVFATRGDLSFFAKTHPKVRGELLYFPTRMDPSLNTMANDRQREGKMTILVGNSGDRSNEHVAALRAVHQQFGDTVKVVVPMGYPPNNEAYIEEVRQAGLALFSEENLQVLSEKLEFDAYLTLLRQCDLGYFIFARQQGIGTLCLLIQAGIPCVLNRENPFWQDMTEQHLPVLFTTDDLNEDIVREAQRQLASVDKNTIAFFSPNYLQGWQRALAIAAGEVA

SEQ ID NO: 2158 - protein, 278 aa, Mycobacterium leprae
MIQSTQTWRVLAGGLAATAMGVTVFAGGTAAADPSPPAPPPAIPGVLPPASLPPIQSVTAVPGGITTNNRFVATPQAPGPAALGQPPLAVAAPVSESLHDYFKAKNIKLVAQKPHGFKALDITLPVPTRWTQVPDPNVPDAFAVIADRLGNSLYTSNAQLVVYNLVGNFDPKEAITHGFVDTQQLSAWQTTNASKADFDGFPSSIIEGTYRENGMTLNTSRRHVIASSGPDKYLVSLSVTTALSQAVADAPATNAIVNGFRVSSPTVSAPVPPQLGTR

SEQ ID NO: 2159 - protein, 450 aa, Shigella sonnei; identical to SEQ ID NO: 1473

SEQ ID NO: 2160 - protein, 414 aa, Coxiella burnetii
MEKRRVVITGLGVVSPLGNKVSDMWQALLAGKSGVKPITRFDASSFPTQIAAEVRDFDPALVLDLKSIRKTDVFVQFAMESARQAWEDSGLEINETNAPRVGVAIGSGIGGMPWIEKNYDALLTSGPRKISPFFIPGAIINMASGMVSIKYDLKGPNISIVTACTTGLHNIGHAARMIAHNDADAMIAGGTEMASTPLGIGGFAAVRALSTRNDEPEKASRPWDKGRDGFVLGEGAACVVVEELEHAKKRNATIYAEIIGFGMSGDAYHMTRPDPEAEGFTTCMKNSLRDAGIAPERVDYINAHGTSTPAADPLEARAIKKTFGDHAYKLAVSSTKSMTGHMLGAAGALETVISVLAIRDNTAPPTINLENPDEGCDLDFVPNEAREMKIDTVMSNSFGFGGTNGTLVLSRVFD

SEQ ID NO: 2161 - protein, 592 aa, Bartonella bacilliformis
MTINLHRPDIAELKPRITVFGVGGGGGNAVNNMINAGLQGVDFVVANTDAQALAMSKAERVIQLGAAVTEGLGAGALPEVGQAAADECIDEIIDHLADSHMVFITAGMGGGTGTGAAPVVARAAREKGILTVGVVTKPFQFEGARRMKTAEAGIEELQKSVDTLIVIPNQNLFRIANEKTTFADAFAMADQVLYSGVASITDLMIKEGLINLDFADVRSVMHEMGRAMMGTGEASGEGRALAAAEAAIANPLLDETSMCGARGLLISITGGRDMTLFEVDEAANRIREEVDADANVIFGAIDDESLEGVIRVSVVATGIDRLASDVVQPSHSKFQKSVSSVRKNDSGINQTASHPQSSQLRSESMVETIESLEVEVSQSQPVEEMFSPKSQIFAKPTDTASTSSRSAATYPFGHGQSDIYGKISNASRIQVNSIPQQSTAAAVSMEATAHVLSEMTNIVEQSEEKQAQIQPYIAPARMPELKDFSPFTHGQGIHSSGLEQGPRSLWQRLKQSLTYREEIEPEARLEPAVKPLQNEESHIYNKNVQKVSSQDSSVYAPHRSTKLQSRALQDQRAFVNEEDQLEIPAFLRRQAN

SEQ ID NO: 2162 - protein, 437 aa, Salmonella typhimurium
MTANNLREQISQLVAQYANEALSPKPFVAGTSVVPPSGKVIGAKELQLMVEASLDGWLTTGRFNDAFEKKLGEFIGVPHVLTTTSGSSANLLALTALTSPKLGERALKPGDEVITVAAGFPTTVNPAIQNGLIPVFVDVDIPTYNIDASLIEAAVTEKSKAIMIAHTLGNAFNLSEVRRIADKYNLWLIEDCCDALGTTYEGQMVGTFGDIGTVSFYPAHHITMGEGGAVFTKSGELKKIIESFRDWGRDCYCAPGCDNTCGKRFGQQLGSLPQGYDHKYTYSHLGYNLKITDMQAACGLAQLERVEEFVEQRKANFSYLKQGLQSCTEFLELPEATEKSDPSWFGFPITLKETSGVNRVELVKFLDEAKIGTRLLFAGNLIRQPYFANVKYRVVGELTNTDRIMNQTFWIGIYPGLTTEHLDYVVSKFEEFFGLNF

SEQ ID NO: 2163 - protein, 363 aa, Burkholderia thailandensis
MSDVNASLVDGKKILVTGGAGFIGCAISERLAARASRYVVMDNLHPQIHANAVRPVALHEKAELVVADVTDAGAWDALLSDFQPEIIIHLAAETGTGQSLTEASRHALVNVVGTTRLTDAIVKHGIAVEHILLTSSRAVYGEGAWQKADGTIVYPGQRGRAQLEAAQWDFPGMTMLPSRADRTEPRPTSVYGATKLAQEHVLRAWSLATKTPLSILRLQNVYGPGQSLTNSYTGIVALFSRLAREKKVIPLYEDGNVTRDFVSIDDVADAIVATLAREPEALSLFDIGSGQATSILDMARIIAAHYGAPEPQVNGAFRDGDVRHAACDLSESLANLGWKPQWSLERGIGELQTWIAQELDRKN

SEQ ID NO: 2164 - protein, 263 aa, Escherichia coli
MSKRNAVTTFFTNRVTKALGMTLALMMTCQSAMASLAADQTRYIFRGDKDALTITVTNNDKERTFGGQAWVDNIVEKDTRPTFVVTPSFFKVKPNGQQTLRIIMASDHLPKDKESVYWLNLQDIPPALEGSGIAVAVRTKLKLFYRPKALIEGRKGAEEGISLQSRPDGRTMLVNTTPYIFAIGSLLDGNGKRIATDNETAQKLLMFMPGDEVQVKGNVVKVDSLNDYGELQTWTINQKKTPTSSGQKASDSLVNPSDKADKK

SEQ ID NO: 2165 - protein, 272 aa, Mycobacterium smegmatis
MPLTPADVHNVAFSKPPIGKRGYNEDEVDAFLDLVENELTRLIEENADLRQRVAELDQELAAARSGAGASSQATSSIPLYEPEPEPAPAPPQPVYEAPAQPAAPQSEDTAVRAARVLSLAQDTADRLTSTAKAEADKLLSDARAQAEAMVSDARQTAETTVSEARQRADAMLADAQTRSEAQLRQAQEKADALQADAERKHSEIMGTINQQRTVLEGRLEQLRTFEREYRTRLKTYLESQLEELGQRGSAAPVDSSANSDASGFGQFNRGNN

SEQ ID NO: 2166 - protein, 551 aa, Coxiella burnetii
MSETFAELFEKSLTETDLRPGALVKATVVEVRPDRVIVNAGLKSEGIIPASEFRNEEPHVGDEFFVVIEASDNGFGETRLSREKARRAKAWSELEKAYKAGEMVKGVIIERVKGGFTVDLNSVRAFLPGSLVDVKPVRDPGYLEDKEIDFKIIKMDQRRNNVVVSRRAVMEAETSAERQARLEELQEGQEIKGVIKNITDYGAFVDLGGVDGLLHITDMAWGRVKHPSDLLNVGDEVHVKVLKFDRDKKRVSLGMKQLADDPWAKIERRYPVNSRVFGKVTNITDYGCFVKLEEGVEGLVHTSELDWTNKNIHPSKVVQSGEEVEVMVLEIDEERRRISLGIKQCKRNPWQEFAEKHEKDEKITGKVRSITDFGMFIGLEGDIDGLVHLSDISWTESGEEAIRNYKKGDEVQAVILGIDPERERISLGIKQLEGDPFMEFVESYDKDAVIQAKVKEVESKQAVLELADQVLGQMRLADYTYDRVKDLTQELNVGDEVAVKIVNVDRKNRLINVSHKAVEGRSEKGTRTVSDVPTKTTLGDLLKEKIQSKDE

SEQ ID NO: 2167 - protein, 246 aa, Shigella flexneri
MNNNTTAPTYTLRGLQLIGWRDMQHALDYLFADGQLKQGTLVAINAEKMLTIEDNAEVRELINAAEFKYADGISIVRSVRKKYPQAQVSRVAGADLWEELMARAGKEGTPVFLVGGKPEVLAQTEAKLRNQWNVNIVGSQDGYFKPEQRQALFERIHASGAQIVTVAMGSPKQEIFMRDCRLVHPDALYMGVGGTYDVFTGHVKRAPKIWQTLGLEWLYRLLSQPSRIKRQLRLLRYLRWHYTGNL

SEQ ID NO: 2168 - protein, 168 aa, Yersinia pestis
MQQETTDTQEYQLAMESFLKGGGTIAMLNEISSDTLEQLYSLAFNQYQSGKYEDAHKVFQALCVLDHYDSRFFLGLGACRQAMGQYDLAIHSYSYGAIMDIKEPRFPFHAAECLLQKGELAEAESGLFLAQELIADKTEFKELSTRVSSMLEAIKLKKEMEHECVDNP

SEQ ID NO: 2169 - protein, 159 aa, Mycobacterium tuberculosis; identical to SEQ ID NO: 1755

SEQ ID NO: 2170 - protein, 112 aa, Mycobacterium tuberculosis; identical to SEQ ID NO: 2074

SEQ ID NO: 2171 - protein, 325 aa, Mycobacterium bovis; identical to SEQ ID NO: 1408

SEQ ID NO: 2172 - protein, 1018 aa, Rickettsia japonica
MSKDGNLNTSEFDPLANKEYTEEQKQTLEQEQKEFLSQTTTPELEADDGFIVTSASSAQSTPSTSALSGNISPDSQTSDPITKAVRETIIQPQKDNLIEQILKDLAALTDHDLAEQKRKEIEEEKDKDKTLSTFFGNPANREFIDKALENPELKKKLESIEIAGYKNVHNTFSAASGYPGGFKPVQWENHVSASDLRATVVKNDAGDELCTLNETTVKTKPFTLAKQDGTQVQISSYREIDFPIKLDKADGSMHLSMVALKADGTKPSKDKAVYFTAHYEEGPNGKPQLKEISSPKPLKFAGTGDDAIAYIEHGGEIYTLAVTRGKYKEMMKEVELNQGQSVDLSQAEDIIIGQGQSKEQPLITPQQTTSSSVEPPQYKQQVPPITPTNQPLQPETSQMPQSQQVNPNLLNAATALSGSMQDLLNYVNAGLTKEIDLIKEAATAILNDKKSDIAEKQANIIALAENTVNNKNLTPDAKVAGVNAVLETIKNDQNTPDLEKSKMLEATVAIALNSENLEPKQKQQILEKAVDVGLSLKDDASRAAAIDGITDAVIKSNLSTEDKGTMFIAVGDKVNVSELSNAEKQKLLGSVLKKGVEAQVLSPAQQQLMQQNLDKITAEQTKKDTIKKVNDILFDPLSNTELKTTNIQAIISNVLDGPATAEVKGEIIQEITNTVAGSSLEAHDKAAIIKGISETIATHSDTSLSLPNKALIMASAEKGIAESQANLPDRELMTKGLVDGIYEGKGGPEITKAVSSGIDNSNINDSEKEALKKAKDAASEAALDRETQNLTEGLKGQNIEEHKPHDDIYNKVREVINAVNPVIEALEKSKEPVVSAEERIVQETSSILNNISKLAVEKVNNFRAMLSPNGNLKTLEEKKEESIKKVDELVKAFGTKSSTEEQQSFIKANLIDDKTLSKEIRLQTIDKLLQEQKRAEAIENPSVKTEDVRVVSGKSKLKPISKDKPDIEKAKMVVGRDRVNIKGNIKIMRALMNARDSIQSENLNKSTPIKRESSPPQR

SEQ ID NO: 2173 - protein, 246 aa, Escherichia coli; identical to SEQ ID NO: 1265

SEQ ID NO: 2174 - protein, 310 aa, Mycobacterium tuberculosis; identical to SEQ ID NO: 2126

SEQ ID NO: 2175 - protein, 103 aa, Legionella pneumophila
LQSSGYFYAVTSSPYSEEADYRLDTQLLKLEQNFIKKPSVLEFSAKIVLTHISDNQIIGSRIVSLQIPCSQDTPYGGVIAANQATFRFTATATDFVVSHIKRD

SEQ ID NO: 2176 - protein, 285 aa, Escherichia coli
MKKTLIALAIAASAASGMAHAWMTGDFNGSVDIGGSITADDYRQKWEWKVGTGLNGFGNVLNDLTNGGTKLTITVTGNKPILLGRTKEAFATPVSGGVDGIPQIAFTDYEGASVKLRNTDGETNKGLAYFVLPMKNAEGTKVGSVKVNASYAGVFGKGGVTSADGELFSLFADGLRAIFYGGLTTTVSGAALTSGSAAAARTELFGSLSRNDILGQIQRVNANITSLVDVAGSYREDMEYTDGTVVSAAYALGIANGQTIEATFNQAVTTSTQWSAPLNVAITYY

SEQ ID NO: 2177 - protein, 478 aa, Helicobacter pylori
MFQPLLDAYVESASIEKMASKSPPPLKIAVANWWGDEEIKEFKNSVLYFILSQRYTITLHQNPNEFSDLVFGNPLGSARKILSYQNAKRVFYTGENESPNFNLFDYAIGFDELDFNDRYLRMPLYYDRLHHKAESVNDTTAPYKLKDNSLYALKKPSHCFKEKHPNLCAVVNDESDPLKRGFASFVASNPNAPIRNAFYDALNSIEPVTGGGSVRNTLGYNVKNKNEFLSQYKFNLCFENTQGYGYVTEKIIDAYFSHTIPIYWGSPSVAKDFNPKSFVNVHDFKNFDEAIDYIKYLHTHKNAYLDMLYENPLNTLDGKAYFYQNLSFKKILAFFKTILENDTIYHDNPFIFCRDLNEPLVTIDDLRVNYDDLRVNYDDLRINYDDLRVNYDDLRINYDDLRVNYDDLRVNYDDLRINYDDLRVNYDDLRVNYERLLSKATPLLELSQNTTSKIYRKAYQKSLPLLRAIRRWVKKLGL

SEQ ID NO: 2178 - protein, 279 aa, Salmonella typhi
MKILIMGAFGFLGSRLTSYFESRHTVIGLARKRNNEATINNIIYTTENNWIEKILEFEPNIIINTIACYGRHNEPATALIESNILMPIRVLESISSLDAVFINCGTSLPPNTSLYAYTKQKANELAAAIIDKVCGKYIELKLEHFYGAFDGDDKFTSMVIRRCLSNQPVKLTSGLQQRDFLYIKDLLTAFDCIISNVNNFPKFHSIEVGSGEAISIREYVDTVKNITKSNSIIEFGVVKERVNELMYSCADIAELEKIGWKREFSLVDALTEIIEEEGK

SEQ ID NO: 2179 - protein, 191 aa, Pseudomonas aeruginosa
MSYYQHPSAIVDDGAQIGSDSRVWHFVHICAGARIGAGVSLGQNVFVGNKVVIGDRCKIQNNVSVYDNVTLEEGVFCGPSMVFTNVYNPRSLIERKDQYRNTLVKKGATLGANCTIVCGVTIGEYAFVGAGAVINKNVPSYALMVGVPARQIGWMSEFGEQLQLNEQGEAVCSHSGARYVLNGKILSKVDV

SEQ ID NO: 2180 - protein, 133 aa, Escherichia coli
MTLPSGHPKSRLIKKFTALGPYIREGKCKDNRFFFDCLAVCVNVKPAPEVREFWGWWMELEAQESRFTYSYQFGLFDKAGDWKSVPVKDTEVVERLEHTLREFHEKLRELLTTLNLKLEPADDFRDEPVKLTA

SEQ ID NO: 2181 - protein, 246 aa, Salmonella schwarzengrund
MTNNAAAPLYSLRGLPLIGWRDMSHALNYLFADGQLKQGTLVAINAEKLLTAEDNPEVRALIAAAEFKYADGISVVRSIRKKFPQAQVSRVAGADLWEALMARAGKEGTPVFLVGGKPEVLAQTEAKLRTQWNVNIVGSQDGYFTPEQRQALFSRIHASGAKIVTVAMGSPKQELLMRDCREVHPHALYMGVGGTYDVFTGHVKRAPKIWQNLGLEWLYRLLSQPKRITRQMRLLRYLRWHYTGDL

SEQ ID NO: 2182 - protein, 2283 aa, Staphylococcus aureus
MSKRQKAFHDSLANEKTRVRLYKSGKNWVKSGIKEIEMFKIMGLPFISHRIVSQDNQSISKKMTGYGLKTTAVIGGAFTVNMLHDQQAFAASDAPLTSELNTQSETVGNQNSTTIEASTSTADSTSVTKNSSSVQTSNSDTVSSEKSENVTSTTNSTSNQQEKLTSTSESTSSKNTTSSSDTKSVASTSSTEQPINTSTNQSTASNNTSQSTTPSSANLNKTSTTSTSTAPVKLRTFSRLAMSTFASAATTTAVTANTITVNKDNLKQYMTASGNATYDQSTGIVTLTQDAYSQKGAITLGTRIDSNKSFHFSGKVNLGNKYEGHGNGGDGIGFAFSPGVLGETGLNGAAVGIGGLSNAFGFKLDTYHNTSTPNASAKAKADPSSVAGGGAFGAFVTTDSYGVASTYTSSSAADNAAKLNVQPTNNAFQDFDINYNGDTKVMTVTYAGQTWTRNISDWIAKSGTTNFSLSMTASTGGATNLQQVQFGTFEYTESAVTQVRYVDVTTGKDIIPPKTYSGNVDQVVTIDNQQSALTAKGYNYTSVDSSYASTYNDTNKTVKMTNAGQSVTYYFTDVKAPTVTVGNQTIEVGKTMNPIVLTTTDNGTGTVTNTVTGLPSGLSYDSATNSIIGTPTKIGQSTVTVVSTDQANNKSTTTFTINVVDTTAPTVTPIGDQSSEVYSPISPIKIATQDNSGNAVTNKSTGLPSGLTFDSTNNTISGTPTNIGTSTITIVSTDASGNKTTTTFKYEVTRNSMSDSVSTSGSTQQSQSVSTSKADSQSASTSTSGSIVVSTSASTSKSTSVSLSDSVSASKSLSTSESNSVSSSTSTSLVNSQSVSSSMSDSASKSTSLSDSISNSSSTEKSESLSTSTSDSLRTSTSLSDSLSMSTSGSLSKSQSLSTSTSDSASTSQSVSDSTSNSISTAESLSESASTSDSISISNSIANSQSASTSKSDSQSTSISLSTSDSKSMSTSESLSDSTSTSDSVSGSLSVAGSQSVSTSTSDSMSTSEIVSDSISTSGSLSASDSKSMSVSSSMSTSQSGSTSESLSDSQSTSDSDSKSLSLSTSQSGSTSTSTSTSSSVRTSESQSTSGSMSTSQSDSTSISTSFSDPTSDSKSASTASSESISQSVSTSTSGSVSTSTSLSTSNSERTSTSMSDSTSLSTSESDSTSDSTSTSDSISEAISGSESTSISLSESNSTGDSESKSASAFLSESLSESTSESTSESLSGSTSDSTSLSDSNSESGSTSTSLSNSTSGSTSISTSTSGSASTSTVKSESVSTSLSTSTSTSLSDSTSLSTSLSDSTSGSKSNSLSASMSTSDSISTRKSESLSASTSLSGSTSESESGSTSSSASQSDSTSMSLSMSQSISGSTSTSTSTSLSDSTSTSLSLSASMNQSGVDSNSASQSASTSTSISTSESDSQSTSTYTSQSTSQSESTSTSTSISDSTSISKSTSQSGSTSTSASLSGSESESDSQSVSTSASESTSESASTSLSDSTSTSNSTSESTSNAISTSASASESDSSSTSLSDSTSASMQSSESDSQSTSTSLSNSQSTSTSIRMSTIVSESVSESTSESGSTSESTSESDSTSTSLSDSQSTSRSTSASGSASTSTSTSDSRSTSAPTSTSMRTSTLDSQSMSLSTSTSTSVSDSTSLSDSVSDSTSDSTSTSTSGSMSASISLSDSTSTSTSASEVMSASISDSQSMSESVNDSESVSESNSESDSKSMSGSTSVSDSGSLSVSTSLRKSESVSESSSLSGSQSMSDSVSTSDSSSLSVSMSLRSSESVSESDSLSDSKSTSGSTSTSTSGSLSTSLSGSESVSESTSLSDSISMSDSTSTSDSDSLSGSISLSGSTSLSTSDSLSDSKSLSSSQSMSGSESTSTSVSDSQSSSASNSQFDSMSISASESDSVSTSDSSSISGSNSTSTSLSTSDSMSGSVSVSTSTSLSDSISGSISVSDSSSTSTSESLSDSMAQSQSTSTSASGSLSTSISTSMSMSASTSTSQSTSVSTSLSTSDSISDSTSISISGSQSAVESESTSDSTSISDSESLSTSDSDSTSTSTSVSTSGSTSTSVSESLSTSGSGSTSVSDSTSMSESDSTSASMSQDKSDSTSISNSESVSTSTSTSLSTSDSTSTSESLSTSMSGSQSISDSTSTSMSNSTSMSNSTSTSMSGSTSTSESNSMHPSDSMSMHHTHSTSTSISTSEATTSTSDSQSTLSATSEATKHNGTRAQSEERLPDTGESIKQNGLLGGIMTLLVGLGLMKRKKKKDENDQDDSQA

SEQ ID NO: 2183 - protein, 361 aa, Pectobacterium carotovorum
MTTLIHVLGSDIPHHNQTVLRFFNDVLATELPEQQIRHFIVASRDGISSADFPALRIETCVDKKTLAEAVIARAKANRNMRFFLHGQFNPTLWLALLSGKIKSEQVYWHVWGADLYEEASSLKYRLFYWLRRMAQKRVGHVFATRGDLAWYQQRAPRVPTSLLYFPTRMNPALTGMQVDKPLAGPMTILVGNSGDRTNRHQEALRAIHKQFGKNVRVIVPMGYPANNESYIAQVEGDGLALFGVKNFQLLKDQLAFDDYLNMLRTCDLGYFIFDRQQGIGTLCLLIQFGVPFVISRQNPFWQDLTEQNLPVLFYGDELDEALVREAQRQLASVDKHQIAFFNPNYLQGWRDALALAMGEPT

SEQ ID NO: 2184 - protein, 168 aa, Yersinia pseudotuberculosis
MQQETTDTQEYQLAMESFLKGGGTIAMLNEISSDTLEQLYSLAFNQYQSGKYEDAHKVFQALCVLDHYDSRFFLGLGACRQAMGQYDLAIHSYSYGAIMDIKEPRFPFHAAECLLQKGELAEAESGLFLAQELIADKPEFKELSTRVSSMLEAIKLKKEMEHECVDNP

SEQ ID NO: 2185 - protein, 159 aa, Mycobacterium tuberculosis; identical to SEQ ID NO: 1755

SEQ ID NO: 2186 - protein, 112 aa, Mycobacterium tuberculosis; identical to SEQ ID NO: 2074

SEQ ID NO: 2187 - protein, 287 aa, Mycobacterium leprae
MNQVDLDSTHRKGLWAILAIAVVASASAFTMPLPAAANADPAPLPPSTATAAPSPAQEIITPLPGAPVSSEAQPGDPNAPSLDPNAPYPLAVDPNAGRITNAVGGFSFVLPAGWVESEASHLDYGSVLLSKAIEQPPVLGQPTVVATDTRIVLGRLDQKLYASAEADNIKAAVRLGSDMGEFYLPYPGTRINQETIPLHANGIAGSASYYEVKFSDPNKPIGQICTSVVGSPAASTPDVGPSQRWFVVWLGTSNNPVDKGAAKELAESIRSEMAPIPASVSAPAPVG

SEQ ID NO: 2188 - protein, 991 aa, Rickettsia sibirica
DTSEFDPLANKEYTEEQKQTEEQEQKEFLSHTTTPALEADDGFIVTSASFAQSTPSMSALSGNISPDSQTSDPITKAVRETIIQPQKDNLIEQILKDLAALTDRDLAEQKRKEIEEEKEKDKTLSTFFGNPANREFIDKALENPELKKKLESIEIAGYKNVHNTFSAASGYPGGFKPVQWENHVSASDLRATVVKNDAGDELCTLNETTVKTKPFTLAKQDGTQVQISSYREIDFPIKLDKADGSMHLSMVALKADGTKPSKDKAVYFTAHYEEGPNGKPQLKEISSPKPLKFAGTGDDAIAYIEHGGEIYTLAVTRGKYKEMMKEVELNQGQSVDLSQAEDIIIGQGQSKEQPLITPQQTTSSSVEPPQYKQQVPPITPTNQPLQPETSQMLQSQQVNPNLLNTATALSGSMQDLLNYVNAGLTKEIDSNKQIDLIKEAATAILNNEKSDIAEKQANIIALAENTVNNKNLKPDAKVAGVNAVLETIKNDQNTPNLEKSKMLEATVAIILNSENLEPNQKQQMLEKAVDVGLSLKDDASRAVTIDGIKDVVIKTNLLSNTEKQKLLGSVLKKGVEAQVLSPAQQQLMQQHLDKITAEQIKKDTIKKVNDILFDPLSNTELKTTNIQAITSNVLDGPATAEVKGEIIQEITNTVAGSSLEAQDKAAIIKGVGETIATHSDTSLSLPNKALIMASAEKGIAESQTNLPDRELMTKGLVDGIYEGKGGPEITKAVSSGIDNSNINDSEKEALKKAKDAASEAALDRDTQNLTEGFKGQNIEEHKPHDDIYNKAREVINAVNPVIEALEKSKEPVVSAEERIVHETSSILNNISKLAVEKVNNFRAMLSPNGNLKTLAEKKEESIKKVDELVKAFGTKSSTEEQQSFIKTNLIDDKTLSKEVRLQTIDKLLQEQKRAEAIENPSVKTEDVRVVSGKSKLKPISKDNPDIEKAKMVVGRDRVNIKGNIKIMGALMNARDIIQSENLNKSTPIKRE

SEQ ID NO: 2189 - protein, 367 aa, Salmonella typhi
MKLLTALSELISIFLFTTIFIFLARKVAIKIGLVDKPNFRKRHQGVIPLVGGISVFAGICFMFGLSDYYIPHLSLYLICAGVLVFVGAMDDRFDISVKIRAVVQAVIAVVMMVIAKLHLGSLGYIFGPWELVLGPFGYFLTLFAVWAAINAFNMVDGIDGLLGGLSSVSFAAMGLILWFDGQTSLAMWCFAMIAAILPYIMLNLGILGRRYKVFMGDAGSTLIGFTVIWLLLETTQGKTHSISPVTALWIIAIPLMDMVAIMYRRLRKGMSPFSPDRQHIHHLVMRAGFTSRQAFVLITLAAAILAGVGVTAEYSHFVPEWVMLVLFLLAFFLYGYCIKRAWKVARFIKRVKRRLRRQRKNRPNLTK

SEQ ID NO: 2190 - protein, 310 aa, Mycobacterium tuberculosis; identical to SEQ ID NO: 2126

SEQ ID NO: 2191 - protein, 201 aa, Legionella pneumophila
MINRKKSIITLCFVLMLPFASWAEAPVIDDSENFAMIDRQEEYDAPLVNPKYDNPQIESAELDGSQNDNYSTDTSQSYDEPALVKEDRSTISDNAKLIDKIQQLQKEIQELRGQLEVQAHDLKLLQQQQVAFYKDLDSRLSNSSTSAKTIQNDKPATDVSLGSNSPATLKAASPQIKRGPSTGPSNSKPQPVIAVSRANPA

SEQ ID NO: 2192 - protein, 283 aa, Escherichia coli
MKKTLIALAIAASAASGMAHAWMTGDFNGSVDIGGSITADDYRQKWEWKVGTGLNGFGNVLNDLTNGGTKLTITVTGNKPILLGRTKEAFATPVTGGVDGIPHIAFTDYEGASVVLRNPDGETNKKGLAYFVLPMKNAEGTKVGSVKVNASYAGVLGRGGVTSADGELLSLFADGLSSIFYGGLPRGSELSAGSAAAARTKLFGSLSRNDILGQIQRVNANITSLVDVAGSYRENMEYTDGTVVSAAYALGIANGQTIEATFNQAVTTSTQWSAPLNVAITYY

SEQ ID NO: 2193 - protein, 1141 aa, Streptococcus suis
MNIQERFSLRKSAVGLVSVSLLCAIYTSTVAADTVVTGVNEIIEESQVKDEVSIESEKNESLDGSNIEIVEEIADNIPSPVIAEGEVAVEMKVDRGTENVVSRNDTEVTTSEQNQIEVTETKEILNQTSYQTESGEQRQIIWAHGITPPAMEQSGGFVKEKYGDYLNYTAPFEAGKGYYDTNKSLNASFIDLNLCFAAVSSNMVHWWLEQNSSYVERYLKEKKGTVNVEENYAITDLRRYINSFQNQQNSRVFDMFKTYYGYRTNGFVSDALVDLFINGYKPKAQGGVNLEDSQLVPDSRGGFFYDVFKEKKLTNRIFSGSYERFGEDVRTVLESKGLLGLTYRTLGYATHIVTVWGAEYDNQGKIKAVYITDSDDQQEQIGLKRMGITRDASGNPRLNNHMKNNSAGALLDYVHTIRLGQDLWEEYFNPLAKAKETASQTLADTKKALDLSIQGQSELPESMRLIYLEKLNNLYNQGILSIQKAESSEMLSGALENGLNSLKSLDFPISEVGNALAPDLPVGDRSTVSDVDSLSSQETSSTNLEADTENAGIIADGTNQLHFPVEAQTTSSVEAEGDNVFEQEADTLPIIIENKDEFGSELSRNMQTSETDSLVVAVEEDVKNDEVAQVEELLESEKVENQSSELLSDTLIVESANDKEEDRVEAVVSEQPDSIPHQNVEISLVEPTNVETETVVTPINDAATPHGSPTYIDNSVTESVATPLEKDSIQAGETEIAEPTSSESTNVETETVVTPVNDVATPHGSPTYIDNSVTESVATPLEKDSIQAGETEIAEPTSSESTNVETETVVTPVNDVATPHGSPTYIDNSVTESVATPLEKDSIQAGETEIAEPTSSESTSVEAELVDNSEIHAATSSVTPCGSSAYADGSTTESVATPLEKDSIQTGNTEIAEPTSSKSTNVEAASVDNSEIHADASLTAVSSVNLDNPVIEPVAISLIGSKRDTNAEVEVSSLSKREVRKTNTDGLISVQSKVIKKELLESSLAEAGSPLLEATIAQSSNSNSTEIGMSYQNTVLLESNNTERQVSKAEIVMEHKETELVETVSSASEPVVLVENISQTSNNTIESGKNMGVQSQAGAKQILGVEQSSKVSTPTSRQIMGVGLLTLVLGSALGLLKKRRK

SEQ ID NO: 2194 - protein, 353 aa, Salmonella typhimurium
MIVNLSRLGKSGTGMWQYSIKFLTALREIADVDAIICSKVHADYFEKLGYAVVTVPNIVSNTSKTSRLRPLVWYVYSYWLALRVLIKFGNKKLVCTTHHTIPLLRNQTITVHDIRPFYYPDSFIQKVYFRFLLKMSVKRCKHVLTVSYTVKDSIAKTYNVDSEKISVIYNSVNKSDFIQKKEKENYFLAVGASWPHKNIHSFIKNKKVWSDSYNLIIVCGRTDYAMSLQQMVVDLELKDKVTFLHEVSFNELKILYSKAYALVYPSIDEGFGIPPIEAMASNTPVIVSDIPVFHEVLTNGALYVNPDDEKSWQSAIKNIEQLPDAISRFNNYVARYDFDNMKQMVGNWLAESK

SEQ ID NO: 2195 - protein, 420 aa, Escherichia coli; identical to SEQ ID NO: 1637

SEQ ID NO: 2196 - protein, 171 aa, Escherichia coli
MKLKKTIGAMALATLFATMGASAVEKTISVTASVDPTVDLLQSDGSALPNSVALTYSPAVNNFEAHTINTVVHTNDSDKGVVVKLSADPVLSNVLNPTLQIPVSVNFAGKPLSTTGITIDSNDLNFASSGVNKVSSTQKLSIHADATRVTGGALTAGQYQGLVSIILTKST

SEQ ID NO: 2197 - protein, 359 aa, Escherichia coli
MTVLIHVLGSDIPHHNRTVLRFFNHALAATSEHAREFMVVGKDDGLSDSCPALSVQFFPGKKSLAEAVIAKAKANRQQRFFFHGQFNPTLWLALLSGGIKPSQFFWHIWGADLYELSSGLRYKLFYPLRRLAQKRVGCVFATRGDLSFFAKTHPKVRGELLYFPTRMDPSLNTMANDRQREGKMTILVGNSGDRSNEHIAALRAVHQQFGDTVKVVVPMGYPPNNEAYIEEVRQAGLELFSEENLQVLSEKLEFDAYLTLLRQCDLGYFIFARQQGIGTLCLLIQAGIPCVLNRENPFWQDMTEQHLPVLFTTDDLNEDIVREAQRQLASVDKNTIAFFSPNYLQGWQRALAIAAGEVA

SEQ ID NO: 2198 - protein, 932 aa, Mannheimia haemolytica
MYKIKHSFNKTLIAISISSFLSIAYATESIENPQPIIQLSESLSSKYSGKGVKLGVMDEGFMVKHPRHSSHLHPLIHQLTTPEGEVRIYDASYPQFEVNPVEKEDGIDLIPSLETHGAGVAGIIAAQADKTLGDGYSGGIAKGAELYVATKSYKRTLEKVIQDAKKELENAKDEEDEKTPSLDQMAKNDLLASKEKEMAIERAEWASGLNKLLDNNVFAINNSWNPFSISDDINVVDKFYQSIKQNKHNPLLQAIMRAKNSNTLLVFAAGNESKKQPGVMALLPRYFPELEKNLISAVAVDKEQKIASYSNHCGASKNWCVAAPGDLHVLIGVADEHKKPQYGLTKEQGTSFSAPAITASLAVLKERFDYLTATQIRDTLLTTATDLGEKGVDNVYGWGLINLKKAVNGPTQFLNDETITVTRDDHWSNPLASQFKITKKGDKSLHLDGENHLDTVAVEEGRLALNGKTKVKTISNHANLAVNGTEVEQNYSSSGQSQLEVLGKSGLIANAQANIHLAGSLKIDDKLTEKTEAGDVSATVVQLKDKATYQGGFTQLVENENLAKRGLIQDLYFKESEIIAKVNKPLTDEKADTNGQAGLALLNALRTTPIAYRRSWYNGWLQSALEQRKLDNLHYAVSNNIYADSLELLRSQNRKGLTQAQQHLFTAYHTPLQTTVWAEHLNQKQSASSKHTDVKHHQSQLGVNHKLADKTVLSATLSQQKNRLEKPFAQATLKQTALNIGLRYHLDNAWFSEATLQFARQKYQQSRRFASHQLGTAETRGSTLGGEMRIGYQFMPNQWIIEPSLGVQWIQTKMNGLNESGELATQTAAMRYRDVNIVPSVKLQRTFQLEQGSISPYIGLNYLHRLNGKITKITSNIAGKTLHSEATTKRNRQLNGEVGVKLHYKNWFTAMNLDYSRVKSCKPIWLESKCWL

SEQ ID NO: 2199 - protein, 246 aa, Yersinia pseudotuberculosis; identical to SEQ ID NO: 1415

SEQ ID NO: 2200 - protein, 146 aa, Yersinia pseudotuberculosis
MMADPLIPWLTEHGLVCHPHTLSGTPISLGSAFQLAGLKLAWRVEIEQRRVWIVLIQRVEQRRGLKNPFAALYMLANAARAVLGPDYYLYGNVDVLAGSSLSTQRLAHFYRRWTGAKELSTGWFSLKVSQVITLSNMKKRQNNGFA

SEQ ID NO: 2201 - protein, 228 aa, Mycobacterium bovis; identical to SEQ ID NO: 1723

SEQ ID NO: 2202 - protein, 261 aa, Mycobacterium tuberculosis; identical to SEQ ID NO: 2090

SEQ ID NO: 2203 - protein, 325 aa, Mycobacterium tuberculosis; identical to SEQ ID NO: 1408

SEQ ID NO: 2204 - protein, 1012 aa, Rickettsia slovaca
DTSEFDPLANKEYTEEQKQTLEQEQKEFLSQTTTPALEADDGFIVTSASSAQSTPSMSALSGNISPDSQTSDPITKAVRETIIQPQKDNLIEQILKDLAALTDRDLAEQKRKEIEEEKEKDKTLSTFFGNPANREFIDKALENPELKKKLESIEIAGYKNVHNTFSAASGYPGGFKPVQWENHVSASDLRATVVKNDAGDELCTLNETTVKTKPFTLAKQDGTQVQISSYREIDFPIKLDKADGSMHLSMVALKADGTKPSKDKAVYFTAHYEEGPNGKPQLKEISSPKPLKFAGTGDDAIAYIEHGGEIYTLAVTRGKYKEMMKEVELNQGQSVDLSQAEDIIIGQGQSKEQPLITPQQTTSSSVEPPQYKQQVPPITPTNQPLQAETSQMPQSQQVNPNLLNTATALSGSMQDLLNYVNAGLTKEIDSNKQIDLIKEAAKAILNNEKSDIAEKQANIIALAENTVNNKNLKPDAKVAGVNAVLETIKNDQNTPDLEKSKMLEATVAIVLNSENLEPKQKQQMLEKAVDVGLSLKDDASRAAAIDGIKDVVIKSNLSPEDKGTMLIAVGDKVNVSELSNAEKQKLLGSVLKKKGVEAQVLSPAQQQLMQQHLYKITAEQTKKDTIKKVNDILFDPLSNTELKTTNIQAITSNVLDGPATAEVKGEIIQEITNTVAGSSLEAQDKAAIIKGVGETIATHSDTSLSLPNKALIMASAEKGIAESQTNLPDRELMTKGLVDGIYEGKGGPEITKAVSSGIDNSNINDSEKEALKKAKDAASEAALDRDTQNLTEGFKGQNIEEHKPHDDIYNKAREVINAVNPVIEALEKFKEPVVSAEERIVQETSSILNNISKLAVEKVNNFRAMLSPTGNLKTLEEKKEESIKKVDELVKAFGTKSSTEEQQSFIKTNLIDDKTLSKEVRLQTIDKLLQEQKRAEAIENPSVKTEDVRVVSGKSKLKPISKDNPDIEKAKMVVGRDRVNIKGNIKIMGALMNARDIIQSENLNKSTPIKRE

SEQ ID NO: 2205 - protein, 246 aa, Salmonella arizonae
MTNNAAAPLYSLRGLPLIGWRDMPHALNYLFADGQLKQGTLVAINAEKLLTAEDNPDVRALIAAAEFKYADGISVVRSIRKKFPQAQVSRVAGADLWEALMARAGKEGTPVFLIGGKPEVLAQTEEKLRAQWNVNIVGSQDGYFTPEQSQALFARIHASGAQIVTVAMGSPKQEIVMHDCREVHPHALYMGVGGTYDVFTGHVKRAPKIWQNLGLEWLYRLLSQPSRITRQMRLLRYLRWHYTDDL

SEQ ID NO: 2206 - protein, 158 aa, Yersinia pseudotuberculosis; identical to SEQ ID NO: 1254

SEQ ID NO: 2207 - protein, 76 aa, Yersinia pestis
MSEALAVLPDDTFTREQAEVVAAQYTNVAIEDDQGAHFRLVVRQNGEMVWRTWNFEPGGTYWLNRYIADYGIRKPQ

SEQ ID NO: 2208 - protein, 285 aa, Escherichia coli
MKKTLIALAIAASAASGMAHAWMTGDFNGSVDIGGSITADDYRQKWEWKVGTGLNGFGNVLNDLTNGGTKLTITVTGNKPILLGRTKEAFATPVTSGVDGIPHIAFTDYEGASVELRNPDGETEKGLAYFVLPMKNAEGTKVGSVKVNASYAGALGRGGVTSADGELMSLFAEGSHAIFYGGLPTNVKNSELKGGSAAAARTELFGSLSKNDILGQIQRVNANITSLVNVPGSFNENMAYTDGSVVSVAYALGIANGQTIEATFNQAVTTSTQWSAPLNVAITYY

SEQ ID NO: 2209 - protein, 574 aa, Shigella flexneri
MKPINNHSFFRSLCGLSCISRLSVEEQCTRDYHRIWDDWAREGTTTENRIQAVRLLKICLDTREPVLNLSLLKLRSLPPLPLHIRELNISNNELISLPENSPLLTELHVNGNNLNILPTLPSQLIKLNISFNRNLSCLPSLPPYLQSLSARFNSLETLPELPSTLTILRIEGNRLTVLPELPHRLQELFVSGNRLQELPEFPQSLKYLKVGENQLRRLSRLPQELLALDVSNNLLTSLPENIITLPICTNVNISGNPLSTHVLQSLQRLTSSPDYHGPQIYFSMSDGQQNTLHRPLADAVTAWFPENKQSDVSQIWHAFEHEEHANTFSAFLDRLSDTVSARNTSGFREQVAAWLEKLSASAELRQQSFAVAADATESCEDRVALTWNNLRKTLLVHQASEGLFDNDTGALLSLGREMFRLEILEDIARDKVRTLHFVDEIEVYLAFQTMLAEKLQLSTAVKEMRFYGVSGVTANDLRTAEAMVRSREENEFTDWFSLWGPWHAVLKRTEADRWAQAEEQKYEMLENEYSQRVADRLKASGLSGDADAEREAGAQVMRETEQQIYRQLTDEVLA

SEQ ID NO: 2210 - protein, 432 aa, Salmonella typhi
MRKLRLVRIPRHLIIAASSWLSKIIIAGVQLVSVKFLLEILGEESYAVFTLLTGLLVWFSIADIGIGSSLQNYISELKADRKSYDAYIKAAVHILFASLIILSSTLFFLSDKLSSLYLTSFSDELKNNSGSYFFIASILFIFIGVGSVVYKILFAELLGWKANIINALSYLLGFLDVVAIHYLMPDSSITFALVALYAPVAILPIIYISFRYIYVLKAKVNFNTYKLLLSRSSGFLIFSSLSIIVLQTDYIVMSQKLSAADIIKYTVTMKIFGLMFFIYTAVLQALWPVCAELRVKMQWRKLHRIIFLNIIGGVFFIGLGTLFIYVLKDYIYSIIANGIDYNISGVVFVLLAVYFSIRVWCDTFAMLLQSMNQLKILWLIVPCQALIGGVTQWYFAEHYGIVGILYGLILSFSLTVFWGLPVYYMYKSKRLA

SEQ ID NO: 2211 - protein, 224 aa, Escherichia coli
MPVRASIEPLTWENAFFGVNSAIVRITSEAPLLTPDALAPWSRVQAKIAASNTGELDALQQLGFSLVEGEVDLALPVNNASDSGAVVAQETDIPALRQLASAAFAQSRFRAPWYAPDASSRFYAQWIENAVRGTFDHQCLILRAASGDIRGYVSLRELNATDARIGLLAGRGAGAELMQTALNWAYARGKTTLRVATQMGNTAALKRYIQSGANVESTAYWLYR

SEQ ID NO: 2212 - protein, 573 aa, Mycobacterium tuberculosis
MTDRLASLFESAVSMLPMSEARSLDLFTEITNYDESACDAWIGRIRCGDTDRVTLFRAWYSRRNFGQLSGSVQISMSTLNARIAIGGLYGDITYPVTSPLAITMGFAACEAAQGNYADAMEALEAAPVAGSEHLVAWMKAVVYGAAERWTDVIDQVKSAGKWPDKFLAGAAGVAHGVAAANLALFTEAERRLTEANDSPAGEACARAIAWYLAMARRSQGNESAAVALLEWLQTTHPEPKVAAALKDPSYRLKTTTAEQIASRADPWDPGSVVTDNSGRERLLAEAQAELDRQIGLTRVKNQIERYRAATLMARVRAAKGMKVAQPSKHMIFTGPPGTGKTTIARVVANILAGLGVIAEPKLVETSRKDFVAEYEGQSAVKTAKTIDQALGGVLFIDEAYALVQERDGRTDPFGQEALDTLLARMENDRDRLVVIIAGYSSDIDRLLETNEGLRSRFATRIEFDTYSPEELLEIANVIAAADDSALTAEAAENFLQAAKQLEQRMLRGRRALDVAGNGRYARQLVEASEQCRDMRLAQVLDIDTLDEDRLREINGSDMAEAIAAVHAHLNMRE

SEQ ID NO: 2213 - protein, 359 aa, Escherichia coli; identical to SEQ ID NO: 1797

SEQ ID NO: 2214 - protein, 267 aa, Staphylococcus aureus; identical to SEQ ID NO: 1356

SEQ ID NO: 2215 - protein, 246 aa, Escherichia coli; identical to SEQ ID NO: 1447

SEQ ID NO: 2216 - protein, 809 aa, Bacillus anthracis
MNIKKEFIKVISMSCLVTAITLSGPVFIPLVQGAGGHGDVGMHVKEKEKNKDENKRKDEERNKTQEEHLKEIMKHIVKIEVKGEEAVKKEAAEKLLEKVPSDVLEMYKAIGGKIYIVDGDITKHISLEALSEDKKKIKDIYGKDALLHEHYVYAKEGYEPVLVIQSSEDYVENTEKALNVYYEIGKILSRDILSKINQPYQKFLDVLNTIKNASDSDGQDLLFTNQLKEHPTDFSVEFLEQNSNEVQEVFAKAFAYYIEPQHRDVLQLYAPEAFNYMDKFNEQEINLSLEELKDQRMLARYEKWEKIKQHYQHWSDSLSEEGRGLLKKLQIPIEPKKDDIIHSLSQEEKELLKRIQIDSSDFLSTEEKEFLKKLQIDIRDSLSEEEKELLNRIQVDSSNPLSEKEKEFLKKLKLDIQPYDINQRLQDTGGLIDSPSINLDVRKQYKRDIQNIDALLHQSIGSTLYNKIYLYENMNINNLTATLGADLVDSTDNTKINRGIFNEFKKNFKYSISSNYMIVDINERPALDNERLKWRIQLSPDTRAGYLENGKLILQRNIGLEIKDVQIIKQSEKEYIRIDAKVVPKSKIDTKIQEAQLNINQEWNKALGLPKYTKLITFNVHNRYASNIVESAYLILNEWKNNIQSDLIKKVTNYLVDGNGRFVFTDITLPNIAEQYTHQDEIYEQVHSKGLYVPESRSILLHGPSKGVELRNDSEGFIHEFGHAVDDYAGYLLDKNQSDLVTNSKKFIDIFKEEGSNLTSYGRTNEAEFFAEAFRLMHSTDHAERLKVQKNAPKTFQFINDQIKFIINS

SEQ ID NO: 2217 - protein, 324 aa, Porphyromonas gingivalis
MNKRKHMDIRRLIISLPAIMALWGGLASCDKMIYDNYDDCPRGVYVNFYSQTECAENPSYPAEVARLNVYAFDKDGILRSANVFEDVQLSAAKEWLIPLEKDGLYTIFAWGNIDDHYNIGEIKIGETTKQQVLMRLKQDGKWATNIDGTTLWYATSPVVELKNMEDGADQYIHTRANLREYTNRVTVSVDSLPHPENYEIKLASSNGSYRFDGTVAKADSTYYPGETKVVGDSTCRAFFTTLKLESGHENTLSVTHKPTGREIFRTDLVGAILSSQYAQNINLRCINDFDIRLVAHHCNCPDDTYVVVQIWINGWLIHSYEIEL

SEQ ID NO: 2218 - protein, 206 aa, Escherichia coli
MHKLFYLLSLLMAPFVANANFMIYPISKDLKNGNSELVRVYSKSKEIQYIKIYTKKIINPGTTEEYKVDIPNWDGGLVVTPQKVILPAGASKSIRLTQFKIPKKEEVYRVYFEAVKPDSKENVIDNKKLTTELSVNIIYAALIRSLPSEQNISLNISRNAKKNIIIYNNGNVRAGVKDIYFCKSSNIDDNCVKKAYNKNIYPEKVI

SEQ ID NO: 2219 - protein, 381 aa, Mycobacterium avium
MDQVEATSTRRKGLWTTLAITTVSGASAVVIALPETSHADPEVPTPVPPSTATTPHPRRRRIPGQPADNAQAGAPAPAPNGQQRPPRRRRMIPTRAPPPAGAPPNGAPPAAPNGAPPPPVDPNAPPPPPADPNAGRIPNSYVLPAGWVESDASHLDYGSALLSKVTGPPPMPDQPPPVANDTRIVMGRVDQKLYASAEANNAKAAVGLGSDMGEFFMPYPGTRINQDSTPLNGANGSTGSASYYEVKFSDASKPNGQIWTGVIGSANAGNRQRWFVVWLGTSNDPVDKVAAKALAESIQAWTPPPAPPAAPGGPGAPAPGAPGAPAPGAPAAPGVTAPAAPAPAAPGAPAAPGAPAPEPGQAPAVEVSPTPTPTPQQTLSA

SEQ ID NO: 2220 - protein, 1011 aa, Rickettsia sibirica
DTSEFDPLANKEYTEEQKQTEEQEQKEFLSQTTTPALEADDGFIVTSASFAQSTPSMSALSGNISPDSQTSDPITKAVRETIIQPQKDNLIEQILKDLAALTDRDLAEQKRKEIEEEKEKNKTLSTFFGNPANREFIDKALEKPELKKKLESIEIAGYNNVHNTFSAASGYPGGFKPVQWENHVSASDLRATVVKNDAGDELCTLNETTVKTKPFTLAKQDGTQVQISSYREIDFPIKLDKADGSMHLSMVALKADGTKPSKDKAVYFTAHYEEGPNGKPQLKEISSPKPLKFAGTGDDAIAYIEHGGEIYTLAVTRGKYKEMMKEVELNQGQSVDLSQAEDIIIGQGQSKEQPLITPQQTTSSSVEPPQYKQQVPPITPTNQPLQPETSQMPQSQQVNPNLLNTATALSGSMQDLLNYVNAGLTKEIDSNKQIDLIKEAATAILNNEKSDIAEKQANIIALAENTVNNKNLKPDAKVAGVNAVLETIKNDQNTPNLEKLKMLEATVAIILNSENLEPKQKQQMLEKAVDVGLSLKDDASRAVTIDGIKDVVIKTNLSTEDKGTMLIAVGDKVNVSELSNAEKQKSLGSVLKKGVEAQVLSPAQQQLIQQHLDKITAEQIKKDTIKKVNDILFDPLSNTELKTTNIQAITSNVLDGPATAKVKGEIIQEITNTVAGSSLEAQDKAAIIKGIGETIATHSDTSLSLPNKALIMASAEKGIAESQTNLPDRELMTKGLVDGIYEGKGGPEITKAVSSGIDNSNINDSEKEALKKAKDAASEAALDRDTQNLTEGLKGQNIEEHKPHDDIYNKAREVINAVNPVIEALEKSKEPVVSAEERIVQETSSILNNISKLAVEKVNNFRAMLSPNGNLKTLEEKKEESIKKVDELVKAFGTKSSTEEQQSFIKTNLIDDKTLSKEVRLQTIDKLLQEQKRAEAIENPSVKTEDVRVVSGKSKLKPISKDNPDIEKAKMVVGRDRVNIKGNIKIMGALMNARDIIQSENLNKSTPIKRE

SEQ ID NO: 2221 - protein, 246 aa, Salmonella dublin; identical to SEQ ID NO: 1293

SEQ ID NO: 2222 - protein, 214 aa, Yersinia pestis
MSHCVVLNKLESVLIIGDSRYALSKNEVLLLECLYLRAGDVISHDELLTTCWPDRVVSPTSLPVAIKHIRDVFRKITRSEVIKTYKNEGYSYQKDSVLIIIDDGSTEKESHSAAYTRKEKPDIPIKLVGLQILSHLNSTFFIAIMMVIIIIFFMVGGNDIVSFIDSDTNSVIITNVTTKMNGPTAGLPKVKNSMIFKDDFGLVIICDQSECKQQ

SEQ ID NO: 2223 - protein, 522 aa, Orientia tsutsugamushi
MKKIMLIASAMSALSLPFSASAIELGDEGVLECGPYAKIGVVGGMVTGVESARLDPADVDCKKHLSLTTMLPFGGTLAAGMTIAPGFRAELGVMYLRNINAEVELGEGKTGSGAANAAIDTGAPIRKRFKLTPPQPTIMPISIADRDLGVDTDILAQAAVGQQQLTVEQRAEDRIAWLKNYAGIDYMVPDSQNPNARVVNPVLLNITQGAPNVNPRPRQNLNILDHDQWRYLVVGVTALSNANKPSVSSVKVLSDKITQIYSDIRQFAKIANIEVPGAPLPNSASVEQIQTKMQELNDVLEELRESFDGYLANAFANQIQLNFQIQQAQQQQQQQQQGQVTAQEAAAAAAVRALNGNEQIIQLYKDLVKLQRHAGIRKAMEKLAAQEEGDDQSQVSCNDKKQQAVAEDSKAGSSKEGKNKEVELDLSMIVAQVKLYADVVATESFSIYIGGGVGVARTYGDIDGKSVKHIGVVASGVLGVAINVADGVCVDIDGGYMHSFSKIEDKYSVNAFIANAGVRYNF

SEQ ID NO: 2224 - protein, 316 aa, Escherichia coli
MDARKNGVLITGGAGFIGKALITEMVERQIPLVSFDISDKPDSLPELSEYFNWYKFSYLESSQRIKELHEIVSRHNIKTVIHLATTMFPHESKKNIDKDCLENVYANVCFFKNLYENGCEKIIFASSGGTVYGKSDTPFSEDDALLPEISYGLSKVMTETYLRFIAKELNGKSISLRISNPYGEGQRIDGKQGVIPIFLNKISNDIPIDIIGSIESKRDYIYISDLVQAFMCSLEYEGHEDIFNIGSGESITLKKLIETIEFKLNKKAVIGFQDPIHTNANGIILDIKRAMAELGWRPTVVLDDGIDKLIKSIRCK

SEQ ID NO: 2225 - protein, 545 aa, Shigella flexneri
MLPINNNFSLPQNSFYNTISGTYADYFSAWDKWEKQALPGEERDEAVSRLKECLINNSDELRLDRLNLSSLPDNLPAQITLLNVSYNQLTNLPELPVTLKKLYSASNKLSELPVLPPALESLQVQHNELENLPALPDSLLTMNISYNEIVSLPSLPQALKNLRATRNFLTELPAFSEGNNPVVREYFFDRNQISHIPESILNLRNECSIHISDNPLSSHALQALQRLTSSPDYHGPRIYFSMSDGQQNTLHRPLADAVTAWFPENKQSDVSQIWHAFEHEEHANTFSAFLDRLSDTVSARNTSGFREQVAAWLEKLSASAELRQQSFAVAADATESCEDRVALTWNNLRKTLLVHQASEGLFDNDTGALLSLGREMFRLEILEDIARDKVRTLHFVDEIEVYLAFQTMLAEKLQLSTAVKEMRFYGVSGVTANDLRTAEAMVRSREENEFTDWFSLWGPWHAVLKRTEADRWAQAEEQKYEMLENEYPQRVADRLKASGLSGDADAEREAGAQVMRETEQQIYRQLTDEVLALRLSENGSQLHHS

SEQ ID NO: 2226 - protein, 430 aa, Salmonella typhimurium
MKVQLLKIPSHLIVAGSSWLSKIIIAGVQLASISYLISMLGEEKYAIFSLLTGLLVWCSAVDFGIGTGLQNYISECRAKNKSYDAYIKSALHLSFIAIIFFIALFYIFSGVISAKYLSSFHEVLQDKTRMLFFTSCLVFSSIGIGAIAYKILFAELVGWKANLLNALSYMIGMLGLLYIYYRGISVDIKLSLIVLYLPVGMISLCYIVYRYIKLYHVKTTKSHYIAILRRSSGFFLFTLLSIVVLQTDYMVISQRLTPADIVQYTVTMKIFGLVFFIYTAILQALWPICAELRVKQQWKKLNKMIGVNILLGSLYVVGCTIFIYLFKEQIFSVIAKDINYQVSILSFMLIGIYFCIRVWCDTYAMLLQSMNYLKILWILVPLQAIIGGIAQWYFSSTLGISGVLLGLIISFALTVFWGLPLTYLIKANKG

SEQ ID NO: 2227 - protein, 361 aa, Yersinia pseudotuberculosis; identical to SEQ ID NO: 1367

SEQ ID NO: 2228 - protein, 460 aa, Mycobacterium tuberculosis; identical to SEQ ID NO: 1578

SEQ ID NO: 2229 - protein, 246 aa, Escherichia coli; identical to SEQ ID NO: 1281

SEQ ID NO: 2230 - protein, 269 aa, Staphylococcus aureus
MKKIATATIATAGFATIAIASGNQAHASEQDNYGYNPNDPTSYSYTYTIDAQGNYHYTWKGNWHPSQLNQDNGYYSYYYYNGYNNYSYNNYNNGYSYNNYSRYNNYSNNNQSYNYNNYNSYNTNSYRTGGLGASYSTSSNNVQVTTTMAPSSNGRSISSGYTSGRNLYTSGQCTYYVFDRVGGKIGSTWGNASNWANAAARAGYTVNNTPKAGAIMQTTQGAYGHVAYVESVNNNGSVRVSEMNYGYGPGVVTSRTISASQAAGYNFIH

SEQ ID NO: 2231 - protein, 246 aa, Escherichia coli; identical to SEQ ID NO: 1265

SEQ ID NO: 2232 - protein, 317 aa, Escherichia coli
MSERHLPDDQSSTIDPYLITSVRQTLAEEGARLQNLSKQLDSGQYQRVLNLIMNCKGHVILSGMGKSGHVGRKMSATLASTGTPSFFIHPAEAFHGDLGMITPYDLLILISASGETDEILKLVPSLKNFGNRIIAITNNGNSTLAKNADAVLELHMANETCPNNLAPTTSTTLTMAIGDALAIAMIRQRKFMPNDFARYHPGGSLGRRLLTRVADVMQHDVPAVQLDASFKTVIQRITSGCQGMVMVEDAEGGLAGIITDGDLRRFMEKEDSLTSATAAQMMTREPLTLPEDTMIIEAEEKMQKDKCLNVIGDQQGK

SEQ ID NO: 2233 - protein, 333 aa, Porphyromonas gingivalis
MKKYLLYASLLTSVLLFSCSKNNPSEPVEDRSIEISIRVDDFTKTGETVRYERNQGSAAERLITNLYLLLFDQSGANPAKYYIAGNTFSGGIWLPDDMKVKLDMTQSEAGERKVYVVANVDNAVKTALDAVANESDLQTVKRTTAMPWSTDIASPFLMSGNKTHDFLANRLLDNVPLVRAIAKVELNISLSEKFQIVPIIVNGSLSEFKFRYVNFDKETYVVKPTTKPDNLISSANGVWPQITDWTVWGASLNTSPAPDAGTGYTLDANGKVTALRIVTYLNERDSKGATVEVALPRVDDGTLPPPEFGPELYRLPLPDKILRNHWYKYEVEI

SEQ ID NO: 2234 - protein, 261 aa, Mycobacterium tuberculosis; identical to SEQ ID NO: 2090

SEQ ID NO: 2235 - protein, 166 aa, Piscirickettsia salmonis
NSAAIFNFSYERYDWVRPGIMLYGISPFADKNGVDLELQPVMHVVSRLISVKQLRQGESVGYGATWQCPEDMQVGILSLGYGDGYPRLAASGTPFLVRGQRCALIGRVSMDMIAIDLRRCPDAGVGEAVTVWGQDLPVEEIARHVGTIAYELVCNMPLRAPYIWQE

SEQ ID NO: 2236 - protein, 1019 aa, Rickettsia typhi
MSKNDNQDISEFDPLNREFTEAEKQQQMQQEQEFFSQSILDIVDDGFIVASSSQSTPSISVLSNSLPHGDQKSDPITEAIRKEILEKQRDILREYLANTNPELAAQIAKEEDDKKFRAFLSNQDNYALINKAFEDPETKKNLEEVEIVGYRNILSTYSAASGYPGGFQPVQWENQVSASDLRSTVVKNDAGEELCTLNETTIKTNSLIVAKQDGTQVQINSYREIDFPIKLDKADGSMHLSMVALKADGTKPAKDKAVYFTAHYEEGPNGKPQLKEISSPQPLKFVGTGDDAVAYIEHGGEIYTLAVTRGKYKAMMKEVALNNGQSVDLSQTIAEDLTKVQGPSHVRHTPIITPNQELELSIETHSNQQVPPITTFNKPLQPEISQTHQLQPQQAQSSGIPNLVLNAAHALSISMQDLLHNINASLTQKQDINKQSDLIKEAANTILNNKKSDFAEKQYNIIALTENTLSNKDIIADAKVNVVSALLETIQNDQNTLDIQKSKILEATVAITLNSENIELKQKQQILEKVVDVSLSIKDDISRAVAIDSITDAVIKSNIANKDKEQIFMTIFDQVNSYEFSNITKQKLLGSMLKKAVETKVISPEQQQLIHQNLDKITTEHTKRDTIEKVNNILLDPFSNTVLKTTNIQVITANVLDSPVPVEIKSELIQVVTQKVAESALEPKDKTEIVKGIGKIIATHSDTSLPLYDKGVIMESVAKGIVESKTDLRERELITEGLVNGIYEVKGDKAVVHAISSVIANSNINQSEKEVLKKSQDIVSERVLDKEIQNLDGELKEKNIEESKLRDDIYNKTQDVANELNIKTFLDDNHGKREVSEEVPKNTSSLLNDISQRTIEKVNNLRAMLSQDANLKTFEEKKDESTKKVDELVKAFDNKSSTEEQQNFIKSHLIDNKTLSREVRLQIIDNLLKAQAQKRAETIENLSAKTEDVRVVSGKSELEPISKDEPYIQKAKMVVERDRVGIKDNIKIMGALINARDSIQSENLNKSTHIKKESSVPQR

SEQ ID NO: 2237 - protein, 246 aa, Salmonella paratyphi; identical to SEQ ID NO: 1351

SEQ ID NO: 2238 - protein, 273 aa, Yersinia pseudotuberculosis
MKNLFFSAYKKVFSYITSIVIFMVSLPYAYSQDVVVNTTKHLFTVKIGTTRVIYPSSSTKGVSVSVANPQDYPILVQTQVKDEDKTSPAPFIVTPPLFRLDAGLQGRVRIIRTGGKFPEDRETLQWLCLTGIPPKNGDAWGNTQNNPKNSSPTMDIQMSISTCIKLLFRPDKVKGDPTDSADSLTWRYKGNYLEVNNPTPFYMNFYSLRIGDEKINLSDLGSKDEIKNGSYVPPFSSRDFIIPVKNKGKATEVFWQVINDNGGVSREFKSTVQ

SEQ ID NO: 2239 - protein, 344 aa, Mycobacterium tuberculosis
MTAAVDGKGPAAMNTHFPDAETVRTVLTLAVRAPSIHNTQPWRWRVCPTSLELFSRPDMQLRSTDPDGRELILSCGVALHHCVVALASLGWQAKVNRFPDPKDRCHLATIGVQPLVPDQADVALAAAIPRRRTDRRAYSCWPVPGGDIALMAARAARGGVMLRQVSALDRMKAIVAQAVLDHVTDEEYLRELTIWSGRYGSVAGVPARNEPPSDPSAPIPGRLFAGPGLSQPSDVLPADDGAAILALGTETDDRLARLRAGEAASIVLLTATAMGLACCPITEPLEIAKTRDAVRAEVFGAGGYPQMLLRVGWAPINADPLPPTPRRELSQVVEWPEELLRQRC

SEQ ID NO: 2240 - protein, 337 aa, Spirochaeta aurantia
MKRFFAILGAALFVGNSGAFAEQATLIDFSKLVGEGNTGLHAPTTIDYSRQAGSAYSAEDKAAMKISLAIPSWEIELASSSQTVENQTLSLVTAAPVKQDAARYGGETVMGVRIHFPSFGINSFAVIKPPFTIPAYATLGDATAQNAVAGGQFDGFGVLKNVGVIKSIQINILGRNYLNRLSLLLEDQNGDEREIVMGYLNFDGWKSLQWNNPNYQTEVRNRDLQIVPLYPRSAPLIKLKGIKIHRDGSQEGGDIVSYIKDIKVIYDQAVVDRNSDVDDEAIWGILRQREEQYRNFELAKLGNLQVLRSLEKKKMAKEADFDQAAPAAAAARAPATN

SEQ ID NO: 2241 - protein, 233 aa, Staphylococcus aureus; identical to SEQ ID NO: 1369

SEQ ID NO: 2242 - protein, 260 aa, Myxococcus xanthus
MIRLVRELYQYRGLLISLVQRELKARYRGSFLGFLWTFLNPTLHMLVYVLLFTVVMRQNIPNFPFFMFVGLLPWIWFSTSVGGGASAISDRRDLLTKVRFPAQVLPTSVVVTNLCNFVLSLPLMLVLGMAYGQWPTWHVVLFPVVVLIQLTFTLALTYILAAINVTFRDLQHIVSNLLTLWFFATPVLYPLSTIQDESARSLMLALNPMVSLMTSYQAIFYEHRLPDAEPLMALAAVSVVLLWAASSIFESRREEFAESI

SEQ ID NO: 2243 - protein, 359 aa, Escherichia coli
MTVLIHVLGSDIPHHNRTVLRFFNDALAATSEHAREFMVVGKDDGLSDSCPALSVQFFPGKKSLAEAVIAKAKANRQQRFFFHGQFNPTLWLALLSGGIKPSQFYWHIWGADLYELSSGLRYKLFYPLRRLAQKRVGCVFATRGDLSFFAKTHPKVRGELLYFPTRMDASLNTMANDRQREGKMTILVGNSGDRSNEHIAALRAVHQQFGDTVKVVVPMGYPPHNEAYIEEVRQAGLELFSEENLQVLSEKLEFDAYLTLLRQCALGYFIFARQQGIGTLCLLIQAGIPCVLNRENPFWQDMTEQHLPVLFTTDDLNEDIVREAQRQLASVDKNTIAFFSPNYLQGWQRALAIAAGEVA

SEQ ID NO: 2244 - protein, 95 aa, Mycobacterium tuberculosis
MTEQQWNFAGIEAAASAIQGNVTSIHSLLDEGKQSLTKLAAAWGGSGSEAYQGVQQKWDATATELNNALQNLARTISEAGQAMASTEGNVTGMFA

SEQ ID NO: 2245 - protein, 355 aa, Haemophilus influenzae
MLSIFVTFLGAFLTLIVMRPLANWIGLVDKPNYRKRHQGTIPLIGGASLFVGNLCYYLMEWDQLRLPYLYLFSIFVLLAIGILDDRFDISPFLRAGIQAILAILMIDLGNIYLDHLGQILGPFQLTLGSIGLIITVFATIAIINAFNMIDGIDGLLGGLSCVSFAAIGILMYRDGQMDMAHWSFALIVSILPYLMLNLGIPFGPKYKVFMGDAGSTLIGFTIIWILLLSTQGKGHPMNPVTALWIIAIPLIDMVAIIYRRVRKGKSPFRPDRLHVHHLMVRAGLTSRQAFLLITFVSAVCATIGILGEVYYVNEWAMFVGFFILFFLYVYSITHAWRITRWVRRMKRRAKRLKKA

SEQ ID NO: 2246 - protein, 255 aa, Staphylococcus aureus; identical to SEQ ID NO: 1292

SEQ ID NO: 2247 - protein, 367 aa, Shigella flexneri; identical to SEQ ID NO: 1383

SEQ ID NO: 2248 - protein, 326 aa, Yersinia pseudotuberculosis
MIRAYEQNPQHFIEDLEKVRVEQLTGHGSSVLEELVQLVKDKNIDISIKYDPRKDSEVFANRVITDDIELLKKILAYFLPEDAILKGGHYDNQLQNGIKRVKEFLESSPNTQWELRAFMAVIHFSLTADRIDDDILKVIVDSMNHHGDARSKLREELAELTAELKIYSVIQAEINKHLSSGGTINIHDKSINLMDKNLYGYTDEEIFKASAEYKILEKMPQTTIQEGETEKKIVSIKNFLESEKKRTGALGNLKDSYSYNKDNNELSHFATTCSDKSRPLNDLVSQKTTQLSDITSRFNSAIEALNRFIQKYDSVMQRLLDDTSGK

SEQ ID NO: 2249 - protein, 228 aa, Mycobacterium tuberculosis; identical to SEQ ID NO: 1723

SEQ ID NO: 2250 - protein, 1147 aa, Helicobacter pylori
MTNETIDQQPQTEAAFNPQQFINNLQVAFLKVDNAVASYDPDQKPIVDKNDRDNRQAFEGISQLREEYSNKAIKNPTKKNQYFSDFINKSNDLINKDNLIDVESSTKSFQKFGDQRYRIFTSWVSHQNDPSKINTRSIRNFMENIIQPPILDDKEKAEFLKSAKQSFAGIIIGNQIRTDQKFMGVFDESLKERQEAEKNGEPTGGDWLDIFLSFIFDKKQSSDVKEAINQEPVPHVQPDIATTTTDIQGLPPEARDLLDERGNFSKFTLGDMEMLDVEGVADIDPNYKFNQLLIHNNALSSVLMGSHNGIEPEKVSLLYGGNGGPGARHDWNATVGYKDQQGNNVATIINVHMKNGSGLVIAGGEKGINNPSFYLYKEDQLTGSQRALSQEEIQNKIDFMEFLAQNNAKLDNLSEKEKEKFRTEIKDFQKDSKAYLDALGNDRIAFVSKKDTKHSALITEFGNGDLSYTLKDYGKKADKALDREKNVTLQGSLKHDGVMFVDYSNFKYTNASKNPNKGVGVTNGVSHLEVGFNKVAIFNLPDLNNLAITSFVRRNLEDKLTTKGLSPQEANKLIKDFLSSNKELVGKTLNFNKAVADAKNTGNYDEVKKAQKDLEKSLRKREHLEKEVEKKLESKSGNKNKMEAKAQANSQKDEIFALINKEANRDARAIAYAQNLKGIKRELSDKLENVNKNLKDFDKSFDEFKNGKNKDFSKAEETLKALKGSVKDLGINPEWISKVENLNAALNEFKNGKNKDFSKVTQAKSDLENSVKDVIINQKVTDKVDNLNQAVSVAKATGDFSRVEQALADLKNFSKEQLAQQAQKNESLNARKKSEIYQSVKNGVNGTLVGNGLSQAEATTLSKNFSDIKKELNAKLGNFNNNNNNGLKNEPIYAKVNKKKAGQAASLEEPIYAQVAKKVNAKIDRLNQIASGLGVVGQAAGFPLKRHDKVDDLSKVGLSRNQELAQKIDNLNQAVSEAKAGFFGNLEQTIDKLKDSTKHNPMNLWVESAKKVPASLSAKLDNYATNSHIRINSNIKNGAINEKATGMLTQKNPEWLKLVNDKIVAHNVGSVPLSEYDKIGFNQKNMKDYSDSFKFSTKLNNAVKDTNSGFTQFLTNAFSTASYYCLARENAEHGIKNVNTKGGFQKS

SEQ ID NO: 2251 - protein, 329 aa, Helicobacter pylori
MSNSMLDKNKAILTGGGALLLGLIVLFYLAYRPKAEVLQGFLEAREYSVSSKVPGRIEKVFVKKGDRIKKGDLVFSISSPELEAKLAQAEAGHKAAKAVSDEVKRGSRDETINSARDVWQAAKSQANLAKETYKRVQDLYDNGVASLQKRDEAYAAYESTKYNESAAYQKYKMALGGASSESKIAAKAKESAALGQVNEVESYLKDVKALAPIDGEVSNVLLSGGELSPKGFPVVLMIDLKDSWLKISVPEKYLNEFKVGKEFEGYIPALKRSAKFRVKYLSVMGDFATWKATNNSNTYDMKSYEVEAIPLEELENFRVGMSVLVTIKP

SEQ ID NO: 2252 - protein, 1902 aa, Rickettsia conorii
MNKLTEQHLLKKSRFLKYSLLASISVGAAIPFEGMAMSKEAFRIDLSNKLLNHVSQLNGYKDTTNNTPQQIGKVIVSEPKINTYTPSEIREMKISNKPKASNPLKDVPIEDHYKVVARSKSDVGTARKVRPITRCKTFAGIEKTEQSQNTYTPESTEQMPQKPEIIITASSPTVSPASNSFITAPNTPNTTLTSPEHYTTAPGTPSSTPATPYQSTSDSKPNDSLGANTPPNINTNSKAVRRLSFSSSGPQQQAVQSSSQVKSEVPPKPTFVPLPIKKSSTEIVAGMVSNISRVNEMIGIKLAEVTQAIDTTDKKDKERLQKLYTQLTSTQKTTEKLKSRAEEIETKIKIGENKDKIKKLEKELTSKNNKADRLFQKIEKIDIPANKVSIKSQETVPVTTASTEVSAFQAQQARINEARQGVFNKNKSSGGNARKSSAGTKREKKKQEAQKQLSEIKKQEKAIKTASDKAKEVAASAKKETSRTALRAMQDKMNGDSEQLNKIEENLKLLTPVVYNSSTGPTYKQSPKATPTIPLSHGVQRILGEQPEDEEGYLVPIKVQQQPYQEIEDPIPSHSKDIYEAKVSQYINYLNSIQPNQSNQAQIDSVIDGLATEMRKFSADQFSQKLGEIAHLASIKAYEGLFEKLYEIQQARILETQKVYEQAEISQSYAEYEENSRKSSIPVLSRSSSAKSVISSNFEEKSALLQTTTTDESLRSDNNWKNSAPYSSSPKLDKRGLEYLDLAGDAFVQNLKQPDTLTIETLGLITPTQNTTVAKSDSSRKNNVSGSISEIQQLQSEKMRTETLGVQDDLGLDLHYTPQETLTEKSTYLVSSKKKQGNIIKRAVSKVGSILQTNYAENRRRKRDGETSKQRTVDQEGEFGHAWGNENHKESSLSVVSGCIKKATQLISLLDAKRTAILQTTSPSQRRSVSLVLQEIENDYREAIKISQKLQQVLIRKPEDIKAYNAKAEKKLDAIKSRADKHFNNIETDVDVGFNPNGGNSHSMPTANMDILPKNLAVTPPTNVGSLYNSPQAQQFQEDHKNIIINDRSQGRLNLVDSTIVRELTDVDASIYNTAPPEVLKEAEALLDRSQGRLNLVDNTIKKGTQPLSNLSTIYESVSYENLASETIYKTEQPKPSISYTNTSKRKLPIPLFRSAELDKKLEYLDLEDKLLEVEEARIVKEKEAIAKLNQYQDPENLEFKRLAMEALDLSSKESQLKQKRKAIEAEFSLNEKSSSTDVSILRSYSIDDISGVLSDAESNLSRSPSVSGLEDLNNSNVMQLEELKSKHEKIANDYNKELELDTLNKEKIWLEGEIKHLDTEFKPKVTESKPVFSCSSSVGSINSFSNDDDLSSRDVVTPVDTLNIEINKDYVDTYIRVLSNKIQKIEEIQKIEELSGSSSRSEELNHIKEAMAYISNRIQDVEELDEKMLLAINAQLQEHDEKISSLLREEATDILAQLLLQEMLVSDGKSESTLPAGDEEQEDTEVSRQLSSLPALASSNESALALSDDREKECLALGDSSEDEESYDSGFEEEEETIGQLSDSDGDNLKITEVDTVIPLEQEAKKEMQTQISENAPTLNQAKVVNTIVNNMIRNRLDASMNMSNNMVAVGAGDEEESHIKRGLWMRGMYGTNNHGRVENMTGYRGTNKGATIGFDAEIDNNIVGIAYSNVHSVFKFKNSKNNDKELINSHVVSIYGQKELPKNFALQALVSASKNFIKDKTTYSYGDTKIKSNVKHRNHSYNAEALLHYNYLLQSKLVITPNIGLRYGKSRDGVYNETGVNVQEIALTMKENNILSGIVGTKVTVPLKDALKFNNLGLIFQGAVEHNFKEKTQRINRVVKIFDNTFKHNYLIPKQPKTSYNLGTGIIGSIKNTTISLDYNYYLNKHYRSHQGSVKLKVNL

SEQ ID NO: 2253 - protein, 211 aa, Streptococcus mutans
MKKQFLEKAVFTVAATAATVVLGNKMADADTYTLQEGDSFFSVAQRYHMDAYELASMNGKDITSLILPGQTLTVNGSAAPDNQAAAPTDTTQATTETNDANANTYPVGQCTWGVKAVATWAGDWWGNGGDWASSASAQGYTVGNTPAVGSIMCWTDGGYGHVAYVTAVGEDGKVQVLESNYKDQQWVDNYRGWFDPNNSGTPGSVSYIYPN

SEQ ID NO: 2254 - protein, 370 aa, Mycobacterium bovis; identical to SEQ ID NO: 1850

SEQ ID NO: 2255 - protein, 405 aa, Rickettsia typhi
MQYLILSLIFLIPSLGMLTGLSIAATVLFFLLIIVITELISFIRKQEFSKKFLIKLYPRFGFDDIFCVKNRIKTELLFIAWCFISCLFTIHPINSLVTFTKVFALLFLRFVNNVVTFQNILYLKNSLILGIITAILLFFIEYSSHGFLTRMFKTHFGLYMLDRGCALLSITTWVVIIILFSNGKNINAFILYIVVLYLLSISDSLASFVGFSIGGIIFILARLIKKIFFKLITISLITGSLLFPIIAKQIDPHNLSEKYLATKPSAAHRLFIWHFVANKIIIKPILGYGFASSKYIKTSDNEMIDYRGEKLHPLPLHPHNNILQITLELGILGLALFLCLVYKYLKEIDNIKISNFRAASYSCFINYYIIGMISYNIWQTWWILSGIWILVLMKLLVKPDIIIDN

SEQ ID NO: 2256 - protein, 506 aa, Salmonella typhimurium
MAQVINTNSLSLLTQNNLNKSQSALGTAIERLSSGLRINSAKDDAAGQAIANRFTANIKGLTQASRNANDGISIAQTTEGALNEINNNLQRVRELAVQSANSTNSQSDLDSIQAEITQRLNEIDRVSGQTQFNGVKVLAQDNTLTIQVGANDGETIDIDLKQINSQTLGLDSLNVQKAYDVKDTAVTTKAYANNGTTLDVSGLDDAAIKAATGGTNGTASVTGGAVKFDADNNKYFVTIGGFTGADAAKNGDYEVNVATDGTVTLAAGATKTTMPAGATTKTEVQELKDTPAVVSADAKNALIAGGVDATDANGAELVKMSYTDKNGKTIEGGYALKAGDKYYAADYDEATGAIKAKTTSYTAADGTTKTAANQLGGVDGKTEVVTIDGKTYNASKAAGHDFKAQPELAEAAAKTTENPLQKIDAALAQVDALRSDLGAVQNRFNSAITNLGNTVNNLSEARSRIEDSDYATEVSNMSRAQILQQAGTSVLAQANQVPQNVLSLLR

SEQ ID NO: 2257 - protein, 233 aa, Staphylococcus aureus; identical to SEQ ID NO: 1465

SEQ ID NO: 2258 - protein, 380 aa, Shigella dysenteriae
MTYFTGFILILFAIIIKRLTPSQSKKNIVLIANAFWGILLVGYTFNEQYFVPLSATTLFFILAFLFFFSMTYILIARSGRVVFSFGTGFIESKYIYWFAGMINIISICFGIILLYNNHFSLKVMREGILDGSISGFGLGISLPLSFCCMYLARHENKKNYFYCFTLLSFLLAVLSTSKIFLILFLVYIVGINSYVSKKKLLIYGVFVFGLFALSSIILGKFSSDPEGKIISAIFDTLRVYLFSGLAAFNLYVEKNATLPENLLLYPFKEVWGTTKDIPKTDILPWINIGVWDTNVYTAFAPWYQSLGLYAAIIIGILLGFYYGIWFSFRQNLAVGFYQTFLCFPLLMLFFQEHYLLSWKMHFIYFLCAILLAMRKALEYE

SEQ ID NO: 2259 - protein, 359 aa, Escherichia coli
MTVLIHVLGSDIPHHNRTVLRFFNDALAATSEHAREFMVVGKDDGLSDSCPALSVQFFPGKKSLAEAVIAKAKANRQQRFFFHGQFNPTLWLALLSGGIKPSQFYWHIWGADLYELSSGLRYKLFYPLRRLAQKRVGCVFATRGDLSFFAKTHPKVRGELLYFPTRMDASLNTMANDRQREGKMTILVGNSGDRSNEHIAALRAVHQQFGDTVKVVVPMGYPPHNEAYIEEVRQAGLELFSEENLQVLSEKLEFDAYLTLLRQCDLGYFIFARQQGIGTLCLLIQAGIPCVLNRENPFWQDMTEQHLPVLFTTDDLNEDIVREAQRQLASVDKNTIAFFSPNYLQGWQRALAIAAGEVA

SEQ ID NO: 2260 - protein, 95 aa, Mycobacterium bovis; identical to SEQ ID NO: 2244

SEQ ID NO: 2261 - protein, 359 aa, Escherichia coli
MTVLIHVLGSDIPHHNRTVLRFFNDALAATSEHAREFMVVGKDDGLSDSCPALSVQFFPGKKSLAEAVIAKAKANRQQRFFFHGQFNPKLWLALLSGGIKPSQFFWHIWGADLYELSSGLRYKLFYPLRRLAQKRVGCVFATRGDLSFFAKTHPKVRGELLYFPTRMDPSLNTMANDRQREGKMTILVGNSGDRSNEHIAALRAVHQQFGDTVKVVVPMGYPPNNEAYIEEVRQAGLELFSEENLQVLSEKLEFDAYLTLLRQCDLGYFIFARQQGIGTLCLLIQAGIPCVLNRENPFWQDMTEQHLPVLFTTDDLNEDIVREAQRQLASVDKNTIAFFSPNYLQGWQRALAIAAGEVA

SEQ ID NO: 2262 - protein, 257 aa, Staphylococcus epidermidis; identical to SEQ ID NO: 1244

SEQ ID NO: 2263 - protein, 251 aa, Escherichia coli
MELVSIIIAAYNCKDTIYATVESALSQTYKNIEIIICDDSSTDDTWDIINKIKDSRIICIKNNYCKGAAGARNCALKIAKGRYIAFLDSDDYWVTTKISNQIHFMETEKVFFSYSNYYIEKDFVITGVFSSPPEINYGAMLKYCNIACSTVILDRTGVKNISFPYIDKEDYALWLNILSKGIKARNTNLVDTYYRVHAGSVSANKFKELIRQSNVLKSIGIKAHHRIICLFYYAINGLIKHCFSYRDKRNA

SEQ ID NO: 2264 - protein, 558 aa, Escherichia coli
MKLFKSILLIAACHAAQASATIDINADPNLTGAAPLTGILNGQKSDTQNMSGFDNTPPPAPPVVMSRMFGAQLFNGTSADSGATVGFNPDYILNPGDSIQVRLWGAFTFDGALQVDPKGNIFLPNVGPVKIAGVSNSQLNALVTSKVKEVYQSNVNVYASLLQAQPVKVYVTGFVRNPGLYGGVTSDSLLNYLIKAGGVDPERGSYVDIVVKRGNRVRSNVNLYDFLLNGKLGLSQFADGDTIIVGPRQHTFSVQGDVFNSYDFEFRESSIPVTEALSWARPKPGATHITIMRKQGLQKRSEYYPISSAPGRMLQNGDTLIVSTDRYAGTIQVRVEGAHSGEHAMVLPYGSTMRAVLEKVRPNSMSQMNAVQLYRPSVAQRQKEMLNLSLQKLEEASLSAQSSTKEEASLRMQEAQLISRFVAKARTVVPKGEVILNESNIDSVLLEDGDVINIPEKTSLVMVHGEVLFPNAVSWQKGMTTEDYIEKCGGLTQKSGNARIIVIRQNGARVNAEDVDSLKPGDEIMVLPKYESKNIEVTRGISTILYQLAVGAKVILSL

SEQ ID NO: 2265 - protein, 387 aa, Coxiella burnetii
MTANNNKKSHIDTRVIHAGQKPDPLTGAVMTPIYTASTYAQKSPGVHQGYEYSRSQNPTRFAYERCVADLESGQHGFAFASGMAATATILELLQPGDHVVVMDDVYGGSYRLFENVRKRSAGLSFSFVDFTDENKVREAVTAKTKMLWVESPSNPRLKIVDLAKIAEIAKEKNIIAVADNTFATPIIQRPLELGFDIVTHSATKYLNGHSDIIGGVAVVGDNKTLAEQLKYLQNAIGAIAAPFDSFMVLRGLKTLAIRMERHCENAMQLAQWLEKHPKVKRVYYPGLPSHPQHSIAKKQMRYFGGMISVELKCDLNETKKVLERCQLFTLAESLGGVESLIEHPAIMTHASIPQAERQKLGITDGFIRLSVGIEAITDLRHDLEAAL

SEQ ID NO: 2266 - protein, 1182 aa, Helicobacter pylori
MTNETIDQQPQTEAAFNPQQFINNLQVAFLKVDNAVASYDPDQKPIVDKNDRDNRQAFEGISQLREEYSNKAIKNPTKKNQYFSDFINKSNDLINKDNLIVVESSTKSFQKFGDQRYRIFTSWVSHQNDPSKINTRCIRNFMEHTIQPPIPDDKEKAEFLKSAKQSFAGIIIGNQIRTDQKFMGVFDESLKERQEAEKNGGPTGGDWLDIFLSFIFDKKQSSDVKEAINQEPLPHVQPDIATSTTHIQGLPPESRDLLDERGNFSKFTLGDMEMLDVEGVADMDPNYKFNQLLIHNNTLSSVLMGSHDGIEPEKVSLLYAGNGGFGAKHDWNATVGYKDQQGNNVATIINVHMKNGSGLVIAGGEKGINNPSFYLYKEDQLTGSQRALSQEEIQNKIDFMEFLAQNNAKLDSLSEKEKEKFRNEIKDFQKDSKPYLDALGNDRIAFVSKKDPKHSALITEFNKGDLSYTLKVMGKKQIKALDREKNVTLQGNLKHDGVMFVNYSNFKYTNASKSPNKGVGVTNGVSHLEAGFSKVAVFNLPNLNNLAITSVVRRDLEDKLIAKGLSPQEANKLVKDFLSSNKELVGKALNFNKAVAEAKNTGNYDEVKRAQKDLEKSLKKREHLEKGDVAKNLESKSGNKNKMEAKAQANSQKDEIFALINKEANRDARAIAYAQNLKGIKRELSDKLENINKDLKDFSKSFDGFKNGKNKDFSKAEETLKALKGSVKDLGINPEWISKVENLNAALNEFKNGKNKDFSKVTQAKSDQENSIKDVIINQKITDKVDELNQAVSVAKIACDFSGVEQALADLKNFSKEQLAQQAQKNESFNVGKSEIYQSVKNGVNGTLVGNGLSGIEATALAKNFSDIKKELNEKFKNFNNNNNNGLKNGGEPIYAQVNKKKTGQVASPEEPIYAQVAKKVTKKIDQLNQAATSGFGGVGQAGFPLKRHDKVEDLSKVGRSVSPEPIYATIDDLGGSFPLKRHDKVDDLSKVGLSRNQELTQKIDNLSQAVSEAKAGFFGNLEQTIDKLKDFTKNNPVNLWAESAKKVPASLSAKLDNYATNSHTRINSNIQNGAINEKATGTERQKNPEWLKLVNDKIVAHNVGSVPLSEYDNIGFSQKNMKDYSDSFKFSTKLNNAVKDIKSGFTQFLANAFSTGYYSMARENAEHGIKNANTKGGFQKS

SEQ ID NO: 2267 - protein, 198 aa, Helicobacter pylori
MLVTKLAPDFKAPAVLGNNEVDEHFELSKNLGKNGVILFFWPKDFTFVCPTEIIAFDKRVKDFHEKGFNVIGVSIDSEQVHFAWKNTPVEKGGIGQVSFPMVADITKSISRDYDVLFEEAIALRGAFLIDKNMKVRHAVINDLPLGRNADEMLRMVDALLHFEEHGEVCPAGWRKGDKGMKATHQGVAEYLKENSIKL

SEQ ID NO: 2268 - protein, 1703 aa, Rickettsia felis
MNKLTEQNLLKKSRFLKYSLLASISVGAIIAIPFEGMASSKQKALFQNALEKKLSLRLSQSNGNRDTTNTPQQIGTVIVPEPERNTYTSSEIREMEISKQSKASNPLKDIPIEDHYKKVARSKSDVGKARKVRPPTRSKTFVDTEKVEQNQNNYTHEPTEQTPQKPEIIITASSPTVSPASNGFVTAPNTPNTTLTSPEHYTTAPGTPSTPVTPYQPTPDSKPNDNLEAKTPPNTNSKAVRRLSFSSEPQQTVVQPSTQAKPPVPPKPLLLSSAGVVAKKVVSNILRVNEMLGIKLAEVESTIKNTQGKENKKPLQQLKKQIASSQKTTEKLKSEAAKIGIKIKELDEENKSLKTGRVKNKRELDKDNAKLKENNKKIDKLQQKLTNKNNEANRLSEEIDISVKKVVLIKPQVKAPVTEMPPAGSFLNQQQQLEVLTQQQKVNAARQAVVDKKRAEANGVKRNSAEYKDLISEREEIQLEQNQRHIAVEKTKKQQQAEDKEQRQEAQKQLSKIKKQEKAIKAASDEAQKILNDAKKEASRTKLKKLQEQMDNHVAMVTNDKIEENIKKLEGLALTPSTTSSAATISKQSLTAKSTMQLSHELQRTLPEDEDGYLEPIKVQQQPYTVMLSNQEVADPKSMDSGLGSLPSGIETDEDTEFNLGWGNGHHKELILSVDSKLIEKAAQLISGLDVKRSEILQTTSPSQQKSLNLALQGIENDYQEAIEVYQGLQQALIHKSEDIKAYNAEAEKRLDAIKSRADKYFNNIETDADVGFNQDWSNVHTQTAQSDSVLKMQQALLEKRSKEGSNPNFTTYLDPQPGEEGLKSIDSGLGSLPIDASVIPQYVEELNNLASFSSLNQIQQKKPLIITNMLLSETSALSDDEFRAVANEVHPKIRPILTYNRQKEKEAKLVEAEAAHSQVVQNAIKTPNSTQAKEAVENAAKLFGQYNNSFKLTQALRDEHRKKYYETPKKVTDSINSLDLAVPAESQQLKEPRSKSLEALDLAGSVSSQLKQAEYKSVLSPSSSVNSLLSNEDEQNHEFEIPKSLSFSFGSLNSDAESQQLKEPRSKSLEALDLAGSVSSQLKQAEYKSVLSPSSSVNSLFSNEDEQNHEFEILKSLSFSFGSLNSDAESNLSWDNTGDIGVGHRYGAEDSCPTPDQSSSKIANSSDKNSSETKLALLRTYQMAVIVKRQELEQLPSTSSGADQNTQKIKELKEVEVTMHDAINACIADSSKLNDVSFEEINEALKKLGSEIPESAISDFESKAQKDPEAILDGSILQEMLSSKDSLPSGDEEQEDTEVTESGIQKAGDKGLLALPVSSNECALALSDGREKECLALGDGSEEKEETIEQLSDSVEGNLKIEQEEKKEMQTQISKNAPTLNQAKVVNTIVNNMIRNRLDASMNMSNNMVAVGAGDEEESRIKRGLWMRGMYGTNNHGRVENMTGYRGTNKGATIGFDVEIDNNILGIAYSNVHSVFKFKNSKNNDKELIDSHVVSIYGQKELPRNFALQALVSASKNFIKDKTTYSYGDTKIRSNVKHSNHSYNAEALLNYNYLLQNKLVITPNIGLRYGKSRDGVYNETGINVQEIALTMKENNILSGIVGTKVKVPLKDVLKFNNLGLTFQGAVEHNFKEKTQRINRVVKIFDTEFKQNYAIPKQPKTSYNLGTGIIGSIKNTTISLDYNYYLNKHYRSHQGSVKLKVNL

SEQ ID NO: 2269 - protein, 408 aa, Rickettsia bellii
MINYFFIFLVPSLGMVAGLSVAATVTVFLLISLLQNIAAWIPNRHCEEQSDVAISLNILRLLRQLFCNFLAMTIKTELLFAGWCLISCLFAIKPINSLINFVQVFTILFLGFVVSNFKPFQNRPKLKKALIFGTLTGILLFFVEYFSYGFLTRIFKANFNLYMLDRGCALLSITAWVVIAILIYDKKYCPALILYILVLYLLSISDSLASFLGFSLGGIVFILARFIKPIFSKLIIFGLITGSLLFPIIAGQINPKGLSDKYLTTHPSAAHRLFIWHFVANKIAEKPLMINGFNSSKYTQVKDSEMIDYKGEKWHPLPLHPHNNILQITLELGLIGLALFLSLVYKYLKQIGNIGNDNFRASSYACFINYYIIGMISYNVWQIWWIASSIWVLILMKLLVKPDIVIDK

SEQ ID NO: 2270 - protein, 370 aa, Mycobacterium tuberculosis; identical to SEQ ID NO: 1850

SEQ ID NO: 2271 - protein, 284 aa, Brucella melitensis
MKRGCAIAVMICGLITSVSAASAADLIVQEPVFEPLPQPALAGWYLRGDIGYNFKSKTGGKWDFWNQFEEPYRGVDDTFNYDDFSLKGGASYGVGVGYRFNDMLRTDLTLDYFRASINGRTNCPSYVKSSHGLNPVEDNCHYEDNSKASVWTAMANAYVDLPRVGPLTPYLGAGIGAAYVKYDTWKTSEICPTCTLQSDKDGFDSWRFAMALMAGVSYDLTDQLKLDLGYRYLRVNGGNAYGYDEQDRQVINQYGQGAGADGPQAKDNGFNIHTVRAGLRYEFR

SEQ ID NO: 2272 - protein, 156 aa, Dichelobacter nodosus
MKSLQKGFTLIELMIVVAIIGILAAIAIPQYQNYIARSQVSRVMSETGQMRTAIETCVLDGKEAGECFIGWTGSNLLDGDFTAGTESTAAATGQAGITIKYPVAADDEGNIVATFGRNAAAAIKPQTLTWSRSKEGTWTCATTVEAKFQPTGCKDK

SEQ ID NO: 2273 - protein, 233 aa, =Staphylococcus aureus; identical to SEQ ID NO: 1369

SEQ ID NO: 2274 - protein, 151 aa, Coxiella burnetii
MTESSFKLAIVVSQFNRAVTEKLLNGVLQRLTELGVQANQIKTVWVPGAVEIPLLAKRLAKSKHYQAVVCLGAVIRGETDHYNYVCQQVSFGCQQVALEYEVPIIFGVLTTTTKEQAFARAGGERGNKGADWADAAVSMIKLMKEIEITDE

SEQ ID NO: 2275 - protein, 450 aa, Escherichia coli; identical to SEQ ID NO: 1473

SEQ ID NO: 2276 - protein, 95 aa, Mycobacterium tuberculosis; identical to SEQ ID NO: 2244

SEQ ID NO: 2277 - protein, 246 aa, Shigella sonnei; identical to SEQ ID NO: 1265

SEQ ID NO: 2278 - protein, 659 aa, Streptococcus pneumoniae
MIQIGKIFAGRYRIVKQIGRGGMADVYLAKDLILDGEEVAVKVLRTNYQTDPIAVARFQREARAMADLDHPHIVRITDIGEEDGQQYLAMEYVAGLDLKRYIKEHYPLSNEEAVRIMGQILLAMRLAHTRGIVHRDLKPQNILLTPDGTAKVTDFGIAVAFAETSLTQTNSMLGSVHYLSPEQARGSKATVQSDIYAMGIIFYEMLTGHIPYDGDSAVTIALQHFQKPLPSVIAENPSVPQALENVIIKATAKKLTNRYRSVSEMYVDLSSSLSYNRRNESKLIFDETSKADTKTLPKVSQSTLTSIPKVQAQTEHKSIKNPSQAVTEETYQPQAPKKHRFKMRYLILLASLVLVAASLIWILSRTPATIAIPDVAGQTVAEAKATLKKANFEIGEEKTEASEKVEEGRIIRTDPGAGTGRKEGTKINLVVSSGKQSFQISNYVGRKSSDVIAELKEKKVPDNLIKIEEEESNESEAGTVLKQSLPEGTTYDLSKATQIVLTVAKKATTIQLGNYIGRNSTEVISELKQKKVPENLIKIEEEESSESEPGTIMKQSPGAGTTYDVSKPTQIVLTVAKKVTSVAMPSYIGSSLEFTKNNLIQIVGIKEANIEVVEVTTAPAGSAEGMVVEQSPRAGEKVDLNKTRVKISIYKPKTTSATP

SEQ ID NO: 2279 - protein, 359 aa, Salmonella choleraesuis
MTVLIHVLGSDIPHHNHTVLRFFNDTLAATSEHAREFMVAGEDNGFTESCPALSLRFYGSKKVLAQAVIAKAKANRRQRFFFHGQFNTSLWLALLSGGIKPAQFYWHIWGADLYEVSHGLKFRLFYPLRRIAQGRVGGVFATRGDLSYFARQHPGVRGELLYFPTRMDPSLNAMAKERQRAGKLTILVGNSGDRSNQHIAALRAVYQQFGDTVNVVVPMGYPANNQAYIDEVRQAGLALFSAENLQILSEKMEFDAYLALLRQCDLGYFIFARQQGIGTLCLLIQADIPCVLNRDNPFWQDMAEQHLPVLFTTDDLNEQVVREAQRQLASVDKSGITFFSPNYLQPWHNALRIAAGEAE

SEQ ID NO: 2280 - protein, 327 aa, Escherichia coli
MSERHLPDDQSSTIDPYLITSVRQTLAEQSAALQNLSKQLDSGQYQRVLNLIMNCKGHVILSGMGKSGHVGRKMSATLASTGTPSFFIHPAEAFHGDLGMITPYDLLILISASGETDEILKLVPSLKNFGNRIIAITNNGNSTLAKNADAVLELHMANETCPNNLAPTTSTTLTMAIGDALAIAMIHQRKFMPNDFARYHPGGSLGRRLLTRVADVMQHDVPAVQLDASFKTVIQRITSGCQGMVMVEDAEGGLAGIITDGDLRRFMEKEDSLTSATAAQMMTREPLTLPEDTMIIEAEEKMQKHRVSTLLVTNKANKVTGLVRIFD

SEQ ID NO: 2281 - protein, 262 aa, Mycobacterium intracellulare
MSASCAVPRLTRFAVFAVAGATALSLSACGSSNKSSSTSTSTSTSTSTVTSAAPSSTPNAEAKVSGLIASVAGNSIQVTKEDNATAAVNFTSATKITEAVPAGLPDVTQGSCLIVKPTEGSAPGQPVTAAKVKISESVNGTCPKPHESTPGGASSTPPSGSPSPAPAKPAWVRGSVASVSGDTINLTGTDASGNTTQTTVTVDDKTKYTKQTTANTEAIAPGKCLSARGTTDSGGALQATSIKLRQAVDGKCGKPKQPGQGG

SEQ ID NO: 2282 - protein, 94 aa, Orientia tsutsugamushi
MKYQPLYDRVLVEPIQNDEAHGKILIPDTAKEKPTEGIVVMVGGGYRNDKGDITPLKVKKGDTIVYTKWAGTEIKLESKDYVVIKESDILLVKS

SEQ ID NO: 2283 - protein, 532 aa, Orientia tsutsugamushi
MKKIMLIASAMSALSLPFSASAIELGEEGLECGPYAKVGVVGGMITGVESARLDPADAEGKKHLSLTNGLPFGGTLAAGMTIAPGFRAEIGVMYLTNITAQVEEGKVKADSVGETKADSVGGKDAPIRKRFKLTPPQPTIMPISIAVRDFGIDIPNQTSAASTSRSLRLNDEQRAAARIAWLKNCAGIDYRVKNPNDPNGPMVINPILLNIPQGNPNPVGNPPQRANPPAGFAIHNHEQWRHLVVGLAALSNANKPSASPVKVLSDKITQIYSDIKHLADIAGIDVPDTSLPNSASVEQIQNKMQELNDLLEELRESFDGYLGGNAFANQIQLNFVMPQQAQQQGQGQQQQAQATAQEAVAAAAVRLLNGNDQIAQLYKDLVKLQRHAGIKKAMEKLAAQQEEDAKNQGEGDCKQQQGTSEKSKKGKDKEAEFDLSMIVGQVKLYADVMITESVSIYAGVGAGLAYTSGKIDNKDIKGHTGMVASGALGVAINAAEGVYVDIEGSYMYSFSKIEEKYSINPLMASVSVRYNF

SEQ ID NO: 2284 - protein, 1022 aa, Rickettsia prowazekii
MSKNGNQDISEFDPLNREFTEAEKQQQMQQEQEFFSQTILDIADDGFMVASSSQATPSISFLSNNRPHGDHKSDPITEAIRKEILEKQRDILREYFVNTNPELAEQIAKEEDDRKFRAFLSNQDNYALINKAFEDTKTKKNLEKAEIVGYKNVLSTYSVANGYQGGFQPVQWENQVSASDLRSTVVKNDEGEELCTLNETTVKTKDLIVAKQDGTQVQINSYREINFPIKLDKANGSMHLSMVALKADGTKPAKDKAVYFTAHYEEGPNGKPQLKEISSPQPLKFVGTGDDAVAYIEHGGEIYTLAVTRGKYKEMMKEVALNHGQSVALSQTIAEDLTHVQGPSHETHKPIIIPNQELESSIEQHTSQQVPPITTFNKSLQPKISQIHQLQPQQAQSSGIPNPVLNAANALSTSMQDLLNNINSYLTKNQDINKQSDLIKEAAIAILNNKKSDFAEKQYNIIDLAKNIFSNKDIIADAKVNVVNTLLETIQNDQNTLDIKKSKILEDTVAITLNSENIELKQKQQILEKVVDIGLSIKDDISRVVAVDSIMDTVIKSNIANEDKEKIFITVFDQINSYEFSNVAKQKLLDSILKKTAETQVLSPEQQQLMNQNLDNITTEHTKRDTIEKVNNILLEPLSNTALKTTNIQVMTSNVLDSPVQIEMKSKLIQVVTKTVAESALVEPKDKTEIVKGIGKTIVTHSDTSLPLHDKVVIMGSVAKGIVESKNDLLDRELIIAGLVDGIYEAKGDNAVVHAISSMIANSNINQSEKEALKRSQDVVSEKVLDKEIQNLDRELKAQNINESKLHDDIYNKTQDVANALKNVITTVLDDNSGQRGVSEEAPKKVSSLLNDISKRTIEKINNLRAMLSQDGNLKTFEEKKDEATKKVDELVKAFDNKSSTEEQQNFIKSNLIDNKTLSREIRLQIIDNLLKAQAQKRAETIENLSAKTEDVRVISGKSELKPISQDEPYIQKAKMVVERDRVDIKDNIKIMSALINARDSIQSENFNKSIHIKKESSFPQR

SEQ ID NO: 2285 - protein, 411 aa, Rickettsia conorii
MQYLISSLIFLIPSLGMLAGLSAAATVTIFLLISFLRGINRHCERLQGVWQSSNNVIPWLDHGIQKIQKDWIPLQAHGITMLFTAWCFISCLFAIHLINSLATFTQVFILLFLGFAVSNSAPFQNRLQLKKALIFGILTAILLFFIEYSSNGFLTRIFKTSFALYMLDRGCALLSITAWVAIIILLSNGKKRHTLMLYILVLYLLSISDSLASFLGFGIGGVIFILTRFMKPIFFKLIAISLITGSLLFPVIAKQIEPQDLSEKYLATQPSAAHRLFIWHFVANKIIEKPILGYGLASSKYIKAGDSEMIDYNGEKWHPLPLHPHNNILQITLELGIIGLILFLCLVYKYLKQISNLENKNFKAISYACFINYYIIGMISYNIWQIWWISSGIWVLVLMKLLVKPDIVIDN

SEQ ID NO: 2286 - protein, 285 aa, Bacillus anthracis
MRGKHIFIITALISILMLAACGQKNSSATVATATDSTITKSDFEKQLKDRYGKDMLYEMIAQDVITKKYKVSDDDVDKEVQKAKSQYGDQFKNVLKNNGLKDEADFKNQIKFKLSMNKAIKQSVTEKDVKDHYKPEIKASHILVSDENEAKEIKKKLDTGASFEELAKQESQDLLSKEKGGDLGYFHSGAMTPEFETAAYKLKIGQISDPVQSPNGYHIIKLTGKKDLKPYDEVKNSIRKNLEEERTADPIFGKKLLQSELKKANIKINDSELEDTFTIVSPQGN

SEQ ID NO: 2287 - protein, 142 aa, Mycobacterium tuberculosis
MGAKKVDLKRLAAALPDYPFAYLITVDDGHRVHTVAVEPVLRELPDGPDGPRAVVDVGLIGGRTRQNLAHRSEVTLLWPPSDPSGYSLIVDGRAQASDAGPDDDTARCGVVPIRALLHRDAAPDSPTAAKGCLHDCVVFSVP

SEQ ID NO: 2288 - protein, 167 aa, Neisseria gonorrhoeae
MNTLQKGFTLIELMIVIAIVGILAAVALPAYQDYTARAQVSEAILLAEGQKSAVTEYYLNHGIWPKDNTSAGVASSSSIKGKYVKEVKVENGVVTATMNSSNVNKEIQGKKLSLWAKRQDGSVKWFCGQPVTRNAKDDTVTADATGNDGKIDTKHLPSTCRDNFDAS

SEQ ID NO: 2289 - protein, 238 aa, Staphylococcus haemolyticus
MKKTVIASSLAVALGVTGYALTTDNSAHASESTTNYAQLANLAQNNPSELNAHPVQAGAYNITFVKDGFKYNFTSDGQSWSWNYTYVGGADTVATTQAAPAAQSTDYSASYSNEASTQSVSSNQQSSNTNVEAVSAPKTTSYSASTSSSSSASTGGSVKEQFLANGGTEAAWNAIVMPESGGNPNAVNPAGYRGLGQTKESWGTGSVASQTKGMINYANSRYGSLDAAIAFRDNHGWW

SEQ ID NO: 2290 - protein, 948 aa, Salmonella typhi
MKYLASFRTTLKVSRYLFRALALLIWLLIAFVSVFYIVNALHQRESEIRQEFNLSSDQAQRFIQRTSDVMKELKYIAENRLTAENGVMSSRARDDKMVVPDFEPLFADSDCAAMGSAWRGSLESLAWFMRYWRDNFSAAYDLNRVFLIGSDNLCMANFGLREMPVERDDALKALHERIMKYRNAPQEESGNNLFWISQGARQGVGYFYALTPVYLANRLQALLGVEQSIRMENFFTPGSLPMGVTIIDENGHSLISLTGPDGIIKAEPRWMQERSWFGYTPGFRELVLKKSLPPSSLSIVYSVPVDLVLERIRILILNAILLNVLVGAGLFTLARMYERRIFIPAESDAQRLEEHEQFNRKIVASAPVGICILRTIDGVNILSNELAHTYLNMLTHEDRQRLTQIICGQQVNFVDVLTSNNTNLQISFVHSRYRNENVAICVLVDVSTRVKMEESLQEMAQAAEQASQSKSMFLATVSHELRTPLYGIIGNLDLLQTKELPKGVDRLVTAMNNSSSLLLKIISDILDFSKIESEQLKIEPREFSPREVMNHITANYLPLVVRKQLGLYCFIEPDVPVSLNGDPMRLQQVISNLLSNAIKFTDIGCIVLHVRCDGDYLSIRVRDTGVGIPAKEVVRLFDPFFQVGTGVQRNFQGTGLGLAICEKLISMMDGDISVDSEPGMGSQFTLRIPLYGAQYPVKKSVEGLAGTCCWLAVRNTSLCQFIETSLARSGVHTQRYEGQEPAADDILIVDDALEHTWQGRAAVVFCRRHIGIPLERAPGEWVHSVASVHELPALLARIYSIELDSEALSSALPTTDKTADSNDDMMILVVDDHPINRRLLADQLGSLGYQCKTANDGVDALNVLSKNAIDIVLSDVNMPNMDGYRLTQRIRQLGLTLPVVGVTANALAEEKQRCLESGMDSCLSKPVTLDALKQTLAVYAERVRKTRA

SEQ ID NO: 2291 - protein, 450 aa, Escherichia coli; identical to SEQ ID NO: 1473

SEQ ID NO: 2292 - protein, 377 aa, Escherichia coli
MNKVLIIGSGFSGATIARLLAEENIKVKIIDDRKHIGGNCYDERDEKTGINVHVYGPHIFHTDNEDVWNFVNKYGTFQPYTTRLKANAKGQIYSLPVNLHTINQYYKTALSPTEARKLIASKGDQTINDPQSFEEQALKFVGEDLYKTFFYGYPKKQWGMEPKEIPASVLKRLPVRFNYDDNYFFHKFQGIPRDGYTPLFQNLLNHPNIEFELGKKVNRATVEELITSEQYGHVFFSGAIDHFYDYEFGMLQYRTLDFEKFYSEDDDYQGCVVMSYCDEDVPYTRVTEHKYFTPWEEHKGSVLYKEFSRSCDKEDIPYYPVRLVSGNSIWNKYEQKAKEETNITFIGRLATYRYLDMDVCIKEAIECAQLYIKNNKE

SEQ ID NO: 2293 - protein, 246 aa, Escherichia coli
MNNNTTAPTYTLRGLQLIGWRDMQHALDYLFADGQLKQGTLVAINAEKMLTIEDNAEVRELINAAEFKYADGISVVRSVRKKYPQAQVSRVAGADLWEELMARAGKEGTPVFLVGGKPEVLAQTETKLRNQWNVNIVGSQDGYFKPEQRQALFERIHASGAQIVTVAMGSPKQEIFMRDCRLVHPDALYMGVGGTYDVFTGHVKRAPKIWQTLGLEWLYRLLSQPSRIKRQLRLLRYLRWHYTGNL

SEQ ID NO: 2294 - protein, 209 aa, Coxiella burnetii
MLKRSIMTLYSGPLDIYSHQVRIVLAEKGVTVDIHNVDANHPSEDLIELNPYATLPTLVDRDLVLFESRVIMEYLDERFPHPPLLPVYPVARSRCRLLMYRIERNFYHSMKIIEEGTPKQAETEREFLTKELIELDPVFGEKTYFMNDDFTLVDCVMAPLLWRLPHLGVHVPPRAAKSMYKYKKLIFERESFKASLSESESELREVDGI

SEQ ID NO: 2295 - protein, 247 aa, Enterobacter sp.
MTDNTSAPMYTLRGLQLIGWRDMQHALDFLCAADGQIKSGTLVAINAEKMLAIEDNAEVKGLIEAAEFKYADGISVVRSIRKKYPQARVSRVAGADLWEALMARAGAANTPVFLIGGKPEVLSQTEQKLRAQWNVNIVGSQDGYFKPEDRQALFERVRDSGAKIVTVAMGSPRQEILMRDCRMICPDALYMGVGGTYDVFTGHVKRAPKVWQNLGLEWLYRLLSQPSRITRQIKLLRYLAWHYTGKM

SEQ ID NO: 2296 - protein, 299 aa, Escherichia coli
MTDNTRLRIAMQKSGRLSDDSRELLARCGIKINLHTQRLIAMAENMPIDILRVRDDDIPGLVMDGVVDLGIIGENVLEEELLNRRAQGEDPRYFTLRRLDFGGCRLSLATPVDDAWDGPLSLNGKRIATSYPHLLKRYLDQKGISFKSCLLNGSVEVAPRAGLADAICDLVSTGATLEANGLREVEVIYRSKACLIQRDGEMEESKQQLIDKLLTRIQGVIQARESKYIMMHAPTQRLDEVIALLPGAERPTILPLAGDQQRVAMHMVSSETLFWETMEKLKALGASSILVLPIEKMME

SEQ ID NO: 2297 - protein, 307 aa, Mycobacterium leprae
MTSAQNESQALGDLAAGQLANATKTVPQLSTITPRWLLHLLNWVPVEAGVYRVNRVVNPERVAVKAEAGAGTEAPLPETFVDYETSPREYTLRTISTLLDIHTRVSDLYSSPHDQITQQLRLTIETIKERQECELVNSPEFGLLAQVTPEQTIRTFAGAPTPDDLDALITKVWKMPSFFLTHPQGIAAFGREATYRGVPPVVVSLFGAQFITWRGIPLIPSDKVPVQDGETKFILVRTGEERQGVVGLFQPGLVGEQAPGLSVRFTGINQAAIATYLVTLYTSLAVLTDDALAVLDNVAVDQFHEYK

SEQ ID NO: 2298 - protein, 100 aa, Mycobacterium avium; identical to SEQ ID NO: 2068

SEQ ID NO: 2299 - protein, 179 aa, Salmonella typhi
MRFHHFWPPNDIYFGVGAAGIIEEVSLITNDRNYLFVNLNRYSLLNALNFFTRMSDINKIIVIISSSRLMPLARFWLTECKNVIAVFDAATSVQDIIRNVSQHQSGEKILTEQRDYRFRINRKDIVKMKYFLSESGMEELQDRFMNSSSTMYRWRKELAVKFGVREPRYLLLPDSVTLL

SEQ ID NO: 2300 - protein, 1013 aa, Rickettsia rhipicephali
DTSEFDPLANKEYTEEQKQKLEQEQKELLSQTTTPELEADDGFIVTSASSAQSTPSISALSGNISPDSQTSDPITKAVRETIIQPQKDNLIEQILKDLAALTDRDLAEQKRKEIEEEKEKDKTLSTFFGNPANREFIDKALENPELKKKLESIEIAGYKNVHNTFSTASGYPGGFKPVQWENQVSASDLRATVVKNDAGDELCTLNETTVKTKPFTVAKQDGTQVQISSYREIDFPIKLDKADGSMHLSMVALKADGTKPSKDKAIYFTAHYEEGPNGKPQLKEISSPKPLKFAGTGDDAIAYIEHGGEIYTLAVTRGKYKEMMKEVELNQGQSVDLSQAEDIIIGQGQSKEQPLITPQQTASSSVESPQYKQQVPPITPTNQPLQPETSQMPQSQQVNPNLLNAATALSGSMQDLLNYVNAGLTKEIDSNKQIDLIKEAATAILHNAKSDIAEKQTNIIALAENTVNNQNLTPDAKVAGVNAVLETIKNDQNTPDLEKSKMLEATVAITLNSENLEPKQKEQMLEKTVDVGLSLKDDASRAAAIDGITDAVIKSNLSTEDKGTMLIAVGDKVNVSELSNAEKQKLLGSVLKKGVEAQVLSPAQQQLMQQNLDKITAEQTKKDTIKKVNDILFDPLSSTELKTTNIQAITSNVLDGPATAEVKGEIIQEITNTVAGSSLEAQDKAEIVKGVGETIATHSDTSLSLPNKALIMASAEKGIVESKTNLPDRELMTKGLVDGIYEGKGGPEITKAVSSGIDNSNINDSEKEALKKAKDAASEATLDIETQNLTEGLKGQNIEEHKPRDDIYNKAQEVINAVNPVIEALEKPKAPVVSAEERIVQETSSILNNISKLAVEKVNNFRAMLSSNGNFKTLEKKKEESIKKVDELVKAFGTKSSTEEQQSFIKANLIDDKTLSKEVRLQTIDKLLQEQTQKQAEAIENPSVKTEDVRVVSGKSELKPISKDTPDIEKAKMVVGRDRVNIKENIKIMGALMNARDSIQSENVNKSTPIKRE

SEQ ID NO: 2301 - protein, 407 aa, Rickettsia felis
MQYLISSLIFLIPSLGMVAGLSVAATVTIFLLMLFLRGINRHCERLKGAWQSHKAGLLRLLRQNLQFFLAMTIKTELLFTAWCFISCLFAIRPINSLATFIQVFILLFLGFTVSNCVPFGNRVQLKNSLILGILTAILLFFIEYSSHGFLTRTFKASFGLYMLDRGCALLSITSWVAIIILLSSGKRRHALMLYILVLYLLSISDSLASFLGFSIGGVIFILARLIKPIFFKLIAISLITGSLLFPVIAKQIEPRDLSEKYLATQPSAAHRLFIWHFVANKITLKPILGYGFASSKYIKVNNSEMINYNGEKWHPLPLHPHNNILQITLELGIIGLILFLCLVYKYLKQINNIKSSNFRAASYSCFINYYIIGMISYNIWQIWWISSGIWVLVLMKLLVKPDIVVDN

SEQ ID NO: 2302 - protein, 273 aa, Yersinia pestis; identical to SEQ ID NO: 2238

SEQ ID NO: 2303 - protein, 399 aa, Haemophilus influenzae
MIQEKHLTFTINLLVSLFFLTILIIPKGYNYAPIILSAIGLIYFIPLKKKLSFSSEDKKLIFSFLFYFFTFLLSIIINKDGIREIDNPSRLLLFIPLLLLFKNFPIKRKTILYAIPSSALITGCVALFQKFALGYEKPFPETMHIQMGNIAISLATFSIVITLHFFIKKQYKSTLFGFVAIILAIMTSALSGARGGWIGLPVVVGIILFLYKEFINKKLIITLIAIITIGLTALITSPKFGIEKRYNAAKSDIVSYLEKNNRNTSLGARFDMWENALIAIKEAPIFGHGSDGYDEFRHKQVKSKQMAKTTLNFGSLHNQYLESWVKRGLVGFIALILIILTPIFYFIKNLNTHNLETKCICILGIIHIVSHIFYFTSQSFLAHNSGNIFYFSAMLCFIV

SEQ ID NO: 2304 - protein, 283 aa, Leptospira interrogans
MIINHNLSAVNAHRSLKFNELAVDKTMKALSSGMRINSAADDASGLAVSEKLRTQINGLRQAERNTEDGMSFIQTAEGFLEQTSNIIQRIRVLAIQTSNGIYSNEDRQLVQVEVSALVDEVDRIASQAEFNKFKLFEGQFARGSRVASMWFHMGPNQNQRERFYIGTMTSKALKLVKADGRPIAISSPGEANDVIGLADAALTKIMKQRADMGAYYNRLEYTAKGLMGAYENMQASESRIRDADMAEEVVSLTTKQILVQSGTAMLAQANMKPNSVLKLLQQI

SEQ ID NO: 2305 - protein, 175 aa, Staphylococcus aureus; identical to SEQ ID NO: 1257

SEQ ID NO: 2306 - protein, 333 aa, Salmonella typhimurium
MLISFCIPTYNRKEYLEELLNSINNQEKFNLDIEICISDNASTDGTEEMIDVWRNNYNFPIIYRRNSVNLGPDRNFLASVSLANGDYCWIFGSDDALAKDSLAILQTYLDSQADIYLCDRKETGCDLVEIRNPHRSWLRTDDELYVFNNNLDREIYLSRCLSIGGVFSYLSSLIVKKERWDAIDFDASYIGTSYPHVFIMMSVFNTPGCLLHYISKPLVICRGDNDSFEKKGKARRILIDFIAYLKLANDFYSKNISLKRAFENVLLKERPWLYTTLAMACYGNSDEKRDLSEFYAKLGCNKNMINTVLRFGKLAYAVKNITVLKNFTKRIIK

SEQ ID NO: 2307 - protein, 450 aa, Escherichia coli; identical to SEQ ID NO: 1373

SEQ ID NO: 2308 - protein, 284 aa, Mycobacterium tuberculosis; identical to SEQ ID NO: 1248

SEQ ID NO: 2309 - protein, 246 aa, Escherichia coli; identical to SEQ ID NO: 1265

SEQ ID NO: 2310 - protein, 589 aa, Mycobacterium leprae
MLRSHGAGVLRKSDAGQQVTLAGWVSRRRDHGGVIFIDLRDSSGITQAVFREPDVLAQAHRLRAEFCIAVSGVVEIRPEGNANAEIPTGDIEVNATSLTVLGESAPLPFQLDEPAGEELRLKYRYLDLRRDGPGSAIRLRSKVNATARAVLARHDFVEIETPTITRSTPEGARDFLVPARLRPGTFYALPQSPQLFKQLLMVAGMERYYQIAHCYRDEDFRADRQPEFTQLDMEMSFVDAEDVIAISEEILTELWMLIGYHIPAPIPRISYADAMRRFGSDKPDLRFGLELVECTEFFCDTTFRVFQAPYVGAVVMPGGAAQPRRTLDEWQDWAKQRGHRGLAYVLVTDDGTLGGPVAKNFSDAERSRLASHVGAEPGDCIFFSAGPAKSSRALLGAARGEIANRLGLIDPEAWAFVWVVDPPLFERADEATKVGEMAVGSGAWTAVHHAFTSPKPEFEDSIESDPGSVLADAYDIVCNGHEIGSGSVRINRRDIQERVFAVMGLEKAEAEEKFGFLLEAFTFGAPPHGGIAFGWDRTNALLAGMESIREVIAFPKTGGGVDPLTDAPASITAQQRKESGIDTKPKEVE

SEQ ID NO: 2311 - protein, 359 aa, Salmonella newport
MTVLIHVLGSDIPHHNHTVLRFFNDTLAATSEHAREFMVAGEDNGFTESCPALSLRFYGSKKALAQAVIAKAKANRRQRFFFHGQFNTSLWLALLSGGIKPAQFYWHIWGADLYEVSNGLKFRLFYPLRRIAQGRVGCVFATRGDLSYFARQHPDVRGELLYFPTRMDPSLNAMAKECQRAGKLTILVGNSGDRSNQHIAALRAVYQQFGDTVNVVVPMGYPANNQDYIDEVRQAGLALFSAENLQILSEKMEFDAYLALLRQCDLGYFIFARQQGIGTLCLLIQADIPCVLNRDNPFWQDMAEQHLPVLFTTDDLNEQVVREAQRQLASVDKSGITFFSPNYLQPWHNALRIAAGEAE

SEQ ID NO: 2312 - protein, 355 aa, Escherichia coli
MSQKYLFIDRDGTLISEPPSDFQVDRFDKLAFEPGVIPQLLKLQKAGYKLVMITNQDGLGTQSFPQADFDGPHNLMMQIFTSQGVQFDEVLICPHLPADECDCRKPKVKLVERYLAEQAMDRANSYVIGDRATDIQLAENMGINGLRYDRETLNWPMIGEQLTRRDRYAHVVRNTKETQIDVQVWLDREGGSKINTGVGFFDHMLDQIATHGGFRMEINVKGDLYIDDHHTVEDTGLALGEALKIALGDKRGICRFGFVLPMDECLARCALDISGRPHLEYKAEFTYQRVGDLSTEMIEHFFRSLSYTMGVTLHLKTKGKNDHHRVESLFKAFGRTLRQAIRVEGDTLPSSKGVL

SEQ ID NO: 2313 - protein, 333 aa, Porphyromonas gingivalis
MKKYLLYASLLTSVLLFSCSKNNPNEPVEDRSIEISIRVDDFTKTGEAVRYERNQGSAAERLITNLYLLLFDQSGANPAKYYITGNTFTGGTWLPDDMKVKLDMTQSEAGERKVYVVANVDNAVKTALDAVANESDLQTVKRTTAMPWSTDIASPFLMSGNKTHDFLANRLLDNVPLVRAIAKVELNISLSEKFQIVPIIVNGSLSEFKFRYVNFDKETYVVKPTTKPDNLISSANGVWPQITDWTVWGASLNTSPAPDAGTGYTLDANGKVTALRIVTYLNERDSKGATVEVALPRVDDGTLPPPEFGPELYRLPLPDKILRNHWYKYEVEI

SEQ ID NO: 2314 - protein, 103 aa, Synechococcus sp.
MAAVSLSVSTVTPLGDRVFVKVAEAEEKTAGGIILPDNAKEKPQVGEIVAVGPGKRNDDGSRQAPEVKIGDKVLYSKYAGTDIKLGNDDYVLLSEKDILAVVA

SEQ ID NO: 2315 - protein, 388 aa, Bacillus cereus; identical to SEQ ID NO: 1777

SEQ ID NO: 2316 - protein, 1795 aa, Rickettsia conorii
MNLQNSHSKKYVLTFFMSTCLLTSSFLSTSARAASFKDLVSKTPAWEKHNSTQQQNIWKDLTPNEKIKKWQEAALVPSFTQAQNDLGIKYKETDLSSFLDNTRHKARQARAEILLYIERVKQQDFDTKKQAYINQGVVPTDIEAATNLGISYDPSKIDNNVEHDQKVRRAEKDKKAVIELYVSSINRGIKYKHYVDNDIIPEIQEVRTALNMNKDDAQSFVASIRTEIMENAKGQYIADSHIPTEKELKKKFGISRDDNRDGYIKSIRLKVMDKEKPQYIADSHIPTEKELEQKFGADKGEATNYIASIATQMMLDKKSYYIDNNIIPNADELMNEFKIGPVKATSYINQIRAGIEANQFLNNNDTTKPSTGRSQKKSGSKNDHWYMSNQSINNTGTSARIVTGREKKQRYFFDPISTFKTYFNTKASKGNLTQSQHNINRIIQQEENIEEFKNLIKTDPIAALTLQVDSSYKQEAVTTILSDFNDDTIQRVLFSNDKGKLDFNTNIDVKNRPILQELLENSSSEEKTKFAERIQDYATRNISNSQFEEKARLDLIKLAASKDKSSVENFLTLQLELKNRMQPYVVNSVYILTPEIVKEINIELKNKGLIRDSLTKDYMIKLAKEVNNHTLNSVIKVILSDSKILSNETNKILGLAVSNNANNLEQTQSGIPNPPPLPLNGGIPNPPPLPLNGSMPPPPLHSQGFSSNSKHFDLNQLQTEYPHIHSLYVQFTHNTTVQSKAPLQPTASSATSTGRSTPETAYAKLYAEYRTETGGTKANDLQDQLIKRQADLTNVIRQILTESYANQGADEKTLLNLFSISTPEIAEKAKEAFNTLAQDQYIKDITVNGKKTITSEEIIKNLFNEDTDDAIKRILLSSCKISEELKRPIKLEFNKSELIRELQGKQNPFKQLEFAYINTKNFDQDIFGNRIDELINNPNILTIVQQATFLTKEDTNLRKTINSDQAQAKLDDLRTAILSTIKIEELITANLPQHDFIAIVKEKDPELLKEFLKATTLTVTGNNNLDQLRLALPSFTGMSNEQIRILSNKLKMSIILKALKECSQEKATQYIHTGNMPPPPPPPPPLPDSQDLELAYLKSLGITKANTSTFKTTPKTYHFSSDIALRYKEFTLSGQKSAGYKAKYSDADLLKKAIVESVAFEHSKNLSKAHQNNKYFEQIQKAVNTMYSSFIGHRTELEQKIHNIYTSKLLELTKDKEFIKYVEDNIILNKKLTKAFTSADSDFIDSRTELEQKIHNIYIQQLTKYPEEEVKEAFNTASLDFIGPRTEIGQEVHNIYKSQLLELTKDTELCLFTQQVLAEATELEQKYGSDIQSENSNNEKKVERLDQEKLQLFKQENEATNDESSTKDDTQPEDSNKKSEQSDSKTALSPRLLSSNDSKNDKSSDDKKSLLALRSSDEDDTGYATDEEELEESNSTTDEELKKDVVLESEDEAIDVSFKTEAITEQDEVTQRQQVSDDTSGKVAILVQATSTLHKPVHYNINDRLTVAAIGAGDEETSINRGVWISGLYGINKQRIWKNIPKYQNRTTGITIGTDAEFINSHDVIGIAYSRLESQIKYNKKLGKTTVNGHLLSIYSLKELIKGFSLQTITSYGHNYIKNRSKNINNIIGKYQNNSLSFQTLLNYKYRTKYDLHFIPNIGFQYDYSRASNYKEYNVDIENLMIQKKSNQLFESSLGGKIVFKPIVTTNNIVLTPSLYGNIEHHFNNKNTKVNAKATFKGQTLQETIITLKQPKLGYNIGSNILMSRKNINVLLEYNYYTHRKYQSHQGLIKLKVNL

SEQ ID NO: 2317 - protein, 225 aa, Bacillus anthracis
MESLGINNIYNALDRIKLNAKMNILVRDPYHYDNNGNIVGVDDSYLKNAYKQILNWSSDGVSLNLDEDVNQALSGYMLQIKKPSNHLTNSPVTITLAGKDSGVGELYRVLSDGTGFLDFNKFDENWRSLVDPGDDVYVYAVTKEDFNAVTRDENGNIANKLKNTLVLSGKIKEINIKTTNINIFVVFMFIIYLLFYIISSTVFAKSCNCILIYVEVSQLMNSVFY

SEQ ID NO: 2318 - protein, 158 aa, Yersinia pestis; identical to SEQ ID NO: 1254

SEQ ID NO: 2319 - protein, 227 aa, Coxiella burnetii
MKKLTVTFLTFISIFFAATAAFAENRPILNTINYQQQVEKWVTTDSADVMVSVNVTTKEKKFDALQHQVMKKLEELSDGRQWHIDSFSMSQDQSGLEVLSWEVRSRMPLALVNSLRQKIDSLSQAGQQYKIQNVDFEPSLVEKEKAFAELRQRVYDQVKVELDNLNKSFPNGHYFLHSIDFVSPPLYAANQKELTLMRSAPSEKTAVTLGRNLMLIANVKVATFLNK

SEQ ID NO: 2320 - protein, 505 aa, Salmonella budapest
MAQVINTNSLSLLTQNNLNKSQSSLSSAIERLSSGLRINSAKDDAAGQAIANRFTSNIKGLTQASRNANDGISIAQTTEGALNEINNNLQRVRELSVQATNGTNSDSDLKSIQDEIQQRLEEIDRVSNQTQFNGVKVLSQDNQMKIQVGANDGETITIDLQKIDVKSLGLDGFNVNGPKEATVGDLKSSFKNVTGYDTYAAGADKYRVDINSGAVVTDAAAPDKVYVNAANGQLTTDDAENNTAVNLFKTTKSTAGTDEAKAIAGAIKGGKEGDTFDYKGVSFTIDTKAGNDGNGTVSTTINGEKVTLTVADITAGAANVNDATLQSSKNVYTSVVNGQFTFDDKTKNESAKLSDLEANNAVKGESKITVNGAEYTANAAGDKVTLAGKTMFIDKTASGVSTLINEDAAAAKKSTANPLASIDSALSKVDAVRSSLGAIQNRFDSAITNLGNTVTNLNSARSRIEDADYATEVSNMSKAQILQQAGTSVLAQANQVPQNVLSLLR

SEQ ID NO: 2321 - protein, 175 aa, Staphylococcus aureus; identical to SEQ ID NO: 1257

SEQ ID NO: 2322 - protein, 259 aa, Klebsiella pneumoniae
MSIKMKYNLGYLFDLLVVITNKDLKVRYKSSMLGYLWSVANPLLFAMIYYFIFKLVMRVQIPNYTVFLITGLFPWQWFASSATNSLFSFIANAQIIKKTVFPRSVIPLSNVMMEGLHFLCTIPVIVVFLFVYGMTPSLSWVWGIPLIAIGQVIFTFGVSIIFSTLNLFFRDLERFVSLGIMLMFYCTPILYASDMIPEKFSWIITYNPLASMILSWRDLFMNGTLNYEYISILYFTGIILTVVGLSIFNKLKYRFAEIL

SEQ ID NO: 2323 - protein, 454 aa, Yersinia pestis; identical to SEQ ID NO: 1357

SEQ ID NO: 2324 - protein, 490 aa, Escherichia coli
MKKSLLAVMLTGLFALVSLPALGNVNLEQLKQKAESGEAKAQLELGYRYFQGNETTKDLTQAMDWFRRAAEQGYTPAEYVLGLRYMNGEGVPQDYAQAVIWYKKAALKGLPQAQQNLGVMYHEGNGVKVDKAESVKWFRLAAEQGRDSGQQSMGDAYFEGDGVTRDYVMAREWYSKAAEQGNVWSCNQLGYMYSRGLGVERNDAISAQWYRKSATSGDELGQLHLADMYYFGIGVTQDYTQSRVLFSQSAEQGNSIAQFRLGYILEQGLAGAKEPLKALEWYRKSAEQGNSDGQYYLAHLYDKGAEGVAKNREQAISWYTKSAEQGDATAQANLGAIYFRLGSEEEHKKAVEWFRKAAAKGEKAAQFNLGNALLQGKGVKKDEQQAAIWMRKAAEQGLSAAQVQLGEIYYYGLGVERDYVQAWAWFDTASTNDMNLFGTENRNITEKKLTAKQLQQAELLSQQYIEKYAPEAWARMQKLKAQSAVKTGNK

SEQ ID NO: 2325 - protein, 359 aa, Escherichia coli
MTVLIHVLGSDIPHHNRTVLRFFNDALAATSEHAREFMVVGKDDGLSDSCPALSVQFFPGKKSLAEAVIAKAKANRQQRFFFHGQFNPTLWLALLSGGIKPSQFYWHIWGADLYELSSGLRYKLFYPLRRLAQKRVGCVFATRGDLSFFAKTHPKVRGELLYFPTRMDPSLNMMANDRQRKGKMTILVGNSGDRSNEHIAALRAVHQQFGDTVKVVVPMGYPPNNEAYIEEVRQAGLALFSEENLQILNEKLEFDAYLALLRQCDLGYFIFARQQGIGTLCLLIQAGIPCVLNRENPFWQDMTEQHLPVLFTTDDLNEDIVREAQRQLASVDKNTIAFFSPNYLQGWQRALAIAAGEVA

SEQ ID NO: 2326 - protein, 239 aa, Staphylococcus aureus
MNKNIVIKSMAALAILTSVTGINAAVVEETQQIANAEKNVTQVKDTNNFPYNGVVSFKDATGFVIGKNTIITNKHVSKDYKVGDRITAHPNGDKGNGGIYKIKSISDYPGDEDISVMNIEEQAVERGPKGFNFNENVQAFNFAKDAKVDDKIKVIGYPLPAQNSFKQFESTGTIKRIKDNILNFDAYIEPGNSGSPVLNSNNEVIGVVYGGIGKIGSEYNGAVYFTPQIKDFIQKHIEQ

SEQ ID NO: 2327 - protein, 359 aa, Salmonella paratyphi; identical to SEQ ID NO: 1845

SEQ ID NO: 2328 - protein, 471 aa, Salmonella montevideo
MITPIIMAGGNGSRLWPLSRTLYPKQFLCLDGSQSMLQTTITRINNLNASDPIVICNEQHRFIVAEQLKELSKSSGDIILEPVGRNTAPAVALAALKCLKKNALLLVLAADHIIKDEETFCKTIQDARKYAEAGKLVTFGIVPTMPETGYGYIRRGQALFSAENDCSLAFRVAEFVEKPNLETAQSYLDSGEYYWNSGMFLFRADRYIEELKIRPDIYKACSLAMESAVTDLDFIRVDEDSFCACPDESIDYAVMEKTNDAVVVPLNAGWSDVGSWSSLWEISDKDSNGNVTKGDVLSHNADNCYLHAETGLVTAVGVKDLIVVQTKDAVLVANTNCVQDVKKIVEKIKLENRHEHITHREVYRPWGKYDSIDFGERYQVKRITVKPGEGISEQQHYHRAEHWIIVAGTAKITIKGEVKILTENESVYIPVGVKHCLENPGKIALELIEVRSGAYLGEDDIVRFSDKYGRN

SEQ ID NO: 2329 - protein, 307 aa, Mycobacterium avium
MTSAQNESQALGDLAARQLANATKTVPQLSTITPRWLLHLLNWVPVEAGIYRVNRVVNPEQVAIKAEAGAGSEEPVPQTYVDYETSPREYTLRSISTLVDIHTRVSDLYSSPHDQIAQQLRLTIETIKERQELELINSPEYGLLAQATGRQTIQTLAGAPTPDDLDALITKVWKTPSFFLTHPLGIAAFGREATYRGVPPPVVSLFGPTQFITWHGIRLPSDKVPVEDGKTKFILVRTGEERQGVVGLFQPGLVGEQAPGLSVRFTGINQSAIATYLVTLYTSLAVLTDDALAVLDDVAVDQFHEYK

SEQ ID NO: 2330 - protein, 541 aa, Mycobacterium leprae
MAKTIAYDEEARRGLERGLNSLADAVKVTLGPKGRNVVLEKKWGAPTITNDGVSIAKEIELEDPYEKIGAELVKEVAKKTDDVAGDGTTTATVLAQALVKEGLRNVAAGANPLGLKRGIEKAVDKVTETLLKDAKEVETKEQIAATAAISAGDQSIGDLIAEAMDKVGNEGVITVEESNTFGLQLELTEGMRFDKGYISGYFVTDAERQEAVLEEPYILLVSSKVSTVKDLLPLLEKVIQAGKSLLIIAEDVEGEALSTLVVNKIRGTFKSVAVKAPGFGDRRKAMLQDMAILTGAQVISEEVGLTLENTDLSLLGKARKVVMTKDETTIVEGAGDTDAIAGRVAQIRTEIENSDSDYDREKLQERLAKLAGGVAVIKAGAATEVELKERKHRIEDAVRNAKAAVEEGIVAGGGVTLLQAAPALDKLKLTGDEATGANIVKVALEAPLKQIAFNSGMEPGVVAEKVRNLSVGHGLNAATGEYEDLLKAGVADPVKVTRSALQNAASIAGLFLTTEAVVADKPEKTAAPASDPTGGMGGMDF

SEQ ID NO: 2331 - protein, 388 aa, Bacillus thuringiensis; identical to SEQ ID NO: 1283

SEQ ID NO: 2332 - protein, 1812 aa, Rickettsia sibirica
MSTCLLTSSFLSTSARAASFKDLVSKTPAWEKHNSTQQQNIWKDLTPNEKIKKWQEAALVPSFTQAQNDLGIKYKETDLSSFLDNTRHKARQARAEILLYIERVKQQDFDTKKQEYINQGVVPTDIEAATNLGISYDPSKIDNNVEHDQKVRRAEKDKKAVIELYISSINRDIKYKHYVDNDIIPEMQEVRTALNMNKDEAQSFVASIRTEIMENAKGQYIADSHIPTEKELKKKFGISRDDNRDGYIKSIRLKVMDKEKPQYIADSHIPTEKELEQKFGADKGEATNYIASIATQMMLGKKSYYIDNNIIPNADELMNEFKIGPVKTASYINQIRAGIEANQFLNNNDTTKPSTGRSQKKSGSKNDHWYMSNQSIHNTGTSSRIFTGREKKQRYFFDPISTFKTHFNTKANKGNLTQSQHSINRIIQQEENIEEFKNLIKTDPIIALTLQVDSSYKQEAVTTILSDFNDDTIQRVLFSNDKGQLDFNTNIDVKNRPILQELLENSSSEEKTKFAERIQDYATRNISNSQFEEKARLDLIKLAASKDKSSVENFLTLQLELKNIMQPYIVNSVYILTPEIVKEINIELKNKGLIRDSLTKDYMIKLAKEVSNHTLNSVIKVILSDSNILSNETNKILGLAVGNNANNLEQTQSGIPNPPPLPLNGGIPNPPPLPLNGSMPPPPPLHSQGFSSNSKHFDLNQLQTEYPHIHSLYIQFTHNTTVQSKAPLQPTASSATSTVRSTPETAYAKLYAEYRTETGGTKANDLQDQLIKRQADLTNVIRQILTESYANQGADEKTLLNLFSISTPEIAEKAKEAFNTLAQDQYIKDITVNGKKTITSEEIIKNLFNEDTDDAVKRILLSSCKISEELKRPIKLQFNQSELIRELQGKQNPFEQLEFAYINAKNFDQDIFGNRVDELINNPNILTIVQQATFLITEDTNLRKTINSDQAQAKLDDLRTAILSTIKFEELITANLPQHDFIAIVKEKDPELLKEFLKATTLKVTGNNNLDQLRLALPSFKGMSNEQIRILSNKLKMPIILKALKECSQEKATKYIHTGNMPPPPPPLPDSQDLELAYLTSLGITKFNANTSTLKTTPKTYHFSSDIALRYKEFTLSGQKSAGYKAKYSDADLLKKAIVESVAFEHSKNLSKAHQNNKYFEQIQEAVDTMYSSFIGPRTEIGQKIHNIYTSKLLELTKDKEFIKYVEDNIILSKKLTEAFTSADSDFIDSRTGLGQKIHDIYIQQLTKYPEEEVKEAFNTANPDFIGPRTEIGQEVHNIYKSQLLELTKDQELSLFTQQVLAESTELERKYGSDIQSGNSNNEKKVGRLDQEKLQSFKQENEATNDASSTKDDTQPEDSNKKSEQSDSKTALSPRLLSSNDSKNDKSSDDKKSLLALRSSDEDDTGYATDEEELEESNSTTNEELEESNSTTNEELEESNSTTNEELEESNSTTNEELKKDVVLESEDEAIDVSFKTEAITEQDEVTQRQQISDDTSGKVAILVQATSTLHKPVHYNINDRLTVAAIGAGDEETSINRGVWISGLYGINKQRIWKNIPKYQNRTTGITIGIDAEFINSHDVIGIAYSRLESQIKYNKKLGKTTVNGHLLSIYSLKELIKGFSLQTITSYGHNYIKNRSKNINNIIGKYQNNNLSFQTLLNYKYRTKYDLHFIPNIGFQYDYSRASNYKEYNVDIENLMIQKKSNQLFESSLGGKIVFKPIVTTNNIVLTPSLYGNIEHHFNNKNTKVNAKATFKGQTLQETIITLKQPKLGYNIGSNILMSRKNINVLLEYNYYTHRKYQSHQGLIKLKVNL

SEQ ID NO: 2333 - protein, 143 aa, Coxiella burnetii
MSAILPTEADRRLLSDIKESITDMQQQMQATYSNLADLKLVGESHDKTVRITMTATYNFEDIEFDERALQGGVKEFKWRIREAWKNLCETIQKTTQSKTIELLQSMRIPEDIRNLSVEEEGGEGGEGGQGTRGMIGNPIASGG

SEQ ID NO: 2334 - protein, 214 aa, Yersinia pseudotuberculosis; identical to SEQ ID NO: 2222

SEQ ID NO: 2335 - protein, 461 aa, Streptococcus mutans
MIGSVLYLVNSQMDTLSIITWLLVILPFPILGTLFLIYTKQDWGYRELKSLIKKSTQAIKPYFQYDQRILYKLKESHARTYNLAQYLHRSGGFPVYKNTKVTYFPNGQSKFEEMKKQLLKAEKFIFLEYFIIAEGLMWGEILSILEQKVQEGVEVRVMYDGMLELSTLSFDYAKRLEKIGIKAKVFSPITPFVSTYYNYRDHRKILVIDNKVAFNGGINLADEYINQIERFGYWKDTAVMLEGEGVASFTLMFLQMWSTTNKDYEFAPYLTQNFHEIVANGYVIPYSDSPLDHEKVGENVYIDILNQARDYVYIMTPYLILDSEMEHALQFAAERGVDVKIIMPGIPDKKVPFALAKRYFPALLDAGVKIYEFTPGFVHAKVFIADDIKAVVGTINLDYRSLYHHFECATYMYQTDCLVDIKADFKETLKQSRRVTRSTLQKEKISTKLIGLVVKLVAPLL

SEQ ID NO: 2336 - protein, 505 aa, Salmonella montevideo
MAQVINTNSLSLLTQNNLNKSQSSLSSAIERLSSGLRINSAKDDAAGQAIANRFTSNIKGLTQASRNANDGISIAQTTEGALNEINNNLQRVRELSVQATNGTNSDSDLKSIQDEIQQRLEEIDRVSNQTQFNGVKVLSQDNQMKIQVGANDGETITIDLQKIDVKSLGLDGFNVNGPKEATVGDLKSSFKNVTGYDTYAAGANKYRVDINSGAVVTDDAAPDKVYVNAANGQLTTDDAENNTAVNLFKTTKSAAGTDEAKAIAGAIKGGKEGDTFDYKGVTFTIDTKTGDDGNGKVSTTINGEKVTLTVADIATGATDVNAATLQSSKNVYTSVVNGQFTFDDKTKNESAKLSDLEANNAVKGESKITVNGAEYTANAAGDKVTLAGKTMFIDKTASGVSTLINEDAAAAKKSTANPLASIDSALSKVDAVRSSLGAIQNRFDSAITNLGNTVTNLNSARSRIEDADYATEVSNMSKAQILQQAGTSVLAQANQVPQNVLSLLR

SEQ ID NO: 2337 - protein, 175 aa, Staphylococcus aureus; identical to SEQ ID NO: 1257

SEQ ID NO: 2338 - protein, 396 aa, Shigella dysenteriae
MKKNILLLFLVHGANYLFPFIVLPYQTRILSIETFADVAKIQAAVMLLSLIVNYGYNLSSTRAIARAVSQAEINKIYSETLIVKLLLATICLALGCVHLMYVKEYSLIYPFIISSIYLYGSALFATWLFQGLEKMKAVVIATTIAKLTGVILTFILVKSPNDIVAALFTQNIGMFISGIISIYLVRKNKYATVICFRLKNIIVSLKEAWPFFLSLAATSVYTYFNVILLSFYAGDYVVANFNAADKLRMAAQGLLIPIGQAVFPRLSKLEGYEYSSKLKIYAIRYAIFGVCISAGLVFLGPMLTTIYLGKEYSLSGEYLQSMFLLPATISISTILSQWMLIPQGKEKILSRIYILGAIVHLLYAFPLVYYYGAWGMVISILFTEVLIVLFMLKAVK

SEQ ID NO: 2339 - protein, 454 aa, Yersinia pseudotuberculosis; identical to SEQ ID NO: 1357

SEQ ID NO: 2340 - protein, 96 aa, Mycobacterium tuberculosis; identical to SEQ ID NO: 1280

SEQ ID NO: 2341 - protein, 359 aa, Escherichia coli; identical to SEQ ID NO: 1303

SEQ ID NO: 2342 - protein, 255 aa, Staphylococcus aureus; identical to SEQ ID NO: 1292

SEQ ID NO: 2343 - protein, 249 aa, Pectobacterium atrosepticum
MTALKTTETIPLYTIRGLPIHGFRNMGTFVDYLFAGERVETGTLVAINAEKVLTAEKEVALRTLLDRAEYKYADGISIVRSIRRKYPQADVTRIAGADLWEALMERAGKQETPVFLVGGKPDVLAQTEAKLRAQWDVNIVGSQDGYFTPEQRDALFERIRASGAQIVTVAMGSPRQEILMRDCRHHYPDALYMGIGGTYDVFTGHVKRAPLVWQNLGLEWLYRLLSQPSRIFRQLRLLKYVAYHYSGRL

SEQ ID NO: 2344 - protein, 191 aa, Helicobacter pylori
MKKFLFKQKFCESLPKSFSKTLLALSLGLILLGVFIPFPKVPKHQSVPLALHFTEHYARFIPTILSVAIPLIQRDAVGLFQVANASIATTFLTHATKRALNHVTINDQRLGERPYGGNFNMPSGHSSMVGLAVAFLMRRYSVKKYLWLLPLIPLTMLARIYLDMHTIGAVLAGLGTGMLCVGLFTSPKNLN

SEQ ID NO: 2345 - protein, 456 aa, Escherichia coli
MKSLTCFKAYDIRGKLGEELNEDIAWRIGRAYGEFLKPKTIVLGGDVRLTSEALKLALAKGLQDAGVDVLDIGMSGTEEIYFATFHLGVDGGIEVTASHNPMDYNGMKLVREGARPISGDTGLRDVQRLAEANDFPPVDETKRGRYQQINLRDAYVDHLFGYINVKNLTPLKLVINSGNGAAGPVVDAIEARFKALGAPVELIKVHNTPDGNFPNGIPNPLLPECRDDTRNAVIKHGADMGIAFDGDFDRCFLFDEKGQFIEGYYIVGLLAEAFLEKNPGAKIIHDPRLSWNTVDVVTAAGGTPVMSKTGHAFIKERMRKEDAIYGGEMSAHHYFRDFAYCDSGMIPWLLVAELVCLKGKTLGEMVRDRMAAFPASGEINSKLAQPVEAINRVEQHFSREALAVDRTDGISMTFADWRFNLRSSNTEPVVRLNVESRGDVKLMEKKTKALLKLLSE

SEQ ID NO: 2346 - protein, 541 aa, Mycobacterium paratuberculosis
MAKTIAYDEEARRGLERGLNALADAVKVTLGPKGRNVVLEKKWGAPTITNDGVSIAKEIELEDPYEKIGAELVKEVAKKTDDVAGDGTTTATVLAQALVREGLRNVAAGANPLGLKRGIEKAVEKVTETLLKSAKEVETKDQIAATAAISAGDQSIGDLIAEAMDKVGNEGVITVEESNTFGLQLELTEGMRFDKGYISGYFVTDAERQEAVLEDPFILLVSSKVSTVKDLLPLLEKVIQAGKPLLIIAEDVEGEALSTLVVNKIRGTFKSVAVKAPGFGDRRKAMLQDMAILTGGQVISEEVGLSLESADISLLGKARKVVVTKDETTIVEGAGDSDAIAGRVAQIRTEIENSDSDYDREKLQERLAKLAGGVAVIKAGAATEVELKERKHRIEDAVRNAKAAVEEGIVAGGGVALLHAIPALDELKLEGEEATGANIVRVALEAPLKQIAFNGGLEPGVVAEKVRNSPAGTGLNAATGEYEDLLKAGIADPVKVTRSALQNAASIAGLFLTTEAVVADKPEKAAAPAGDPTGGMGGMDF

SEQ ID NO: 2347 - protein, 391 aa, Staphylococcus aureus; identical to SEQ ID NO: 1347

SEQ ID NO: 2348 - protein, 124 aa, Staphylococcus aureus; identical to SEQ ID NO: 1692

SEQ ID NO: 2349 - protein, 179 aa, Escherichia coli; identical to SEQ ID NO: 1285

SEQ ID NO: 2350 - protein, 837 aa, Yersinia pestis
MKKLIVQFTTITLLMSTSFLVGAQRYSFDPNLLVDGNNNTDTSLFEQGNELPGTYLVDIILNGNKVDSTNVTFHSEKSPSGEPFLQSCLTKEQLSRYGVDVDAYPELSPALKNSQTNPCVNLAAIPQASEEFQFYNMQLVLSIPQAALRPEGEVPIERWDDGITAFLLNYMANISETQFRQNGGYRRSQYIQLYPGLNLGAWRVRNATNWSQSGDRGGKWQSAYTYATRGIYRLKSRVTLGESYTPGDFFDSIPFRGVMLGDDPNMQPSNQRDFIPVVRGIARSQAQVEIRQNGYLIYSTVVPPGPFELSDVIPSKSGSDLHVRVLESNGASQAFIVPYEVPAIALRKGHLRYNLVAGQYRPANADVETPPVAQATVAYGLPWNLTAFIGEQWSRHYQATSAGLGGLLGEYGALSSSITQATSQYHHQQPVKGQAWEVRYNKTLQASDTSFSLVNSQYSTNGFSTLSDVLQSYRQSGSGDNRDKIDENSRSRDLRNQISAVIGQSLGKFGYLNLNWSRQVYRGPIPAKNSLGIHYNLNVGNSFWALSWVQNANENKNDRILSLSVSIPLGGHHDTYASYRMTSSNGSNDHEIGMYGQAFDSRLSWSVRQAEHYGQPNSGHNSGSLRLGWQGSYGNIAGNYYYTPSIRQLSADVSGGAIIHRHGLTLGPQINGTSVLVEVPGVGGVTTTEDRRLKTDFRGYSIVSGLSPYQEHDIVLETADLPPDAEVAKTDTKVLPTEGAIVRASFSPQIGAKALMTITRANGQTIPFGAMASLVNQSANAAIVDEGGKAYLTGLPETGQLLVQWGKDAGQQCRVDYQLSPAEKGDTGLYMLSGVCH

SEQ ID NO: 2351 - protein, 429 aa, Klebsiella pneumoniae
MIRRKFSRVFSKRTDMHNIIRLLFRNPFFFLFCLFIPFDNTSLQSIGGIMTASPSALILLPGLFVSILSKGLKVNKNILLCFFGVLLISFLYYFYWVFYFPELDPIFILDRGSRYFLLYVFYFLALYYSLRQNIKDIRAGAALIIIVVIFSVLLNYLDPAIINNKSIIQYNDFISPERLRGFSLEASVFGYQIVCSILLLAVLLNWSTFFLVTVTIVIAILTTSKGAALSFLICICFYFSLKGKLMFRVLLSLCSIVISYIIFKYYFLDALASDIDTYSSVATRGTMFIVGLKIFLFNPLGVGFFGYLPSIYDFTSGVIDFIKSHFPFLNFDEVYTYTIPGEYKTVGTKSLILDLLIIYGVFFLIPFIYFIKKILKEFDAQSERNSYFLLLFIIFSNMFFISHLGSYFTPFCIAFLIILSKNRAENDIN

SEQ ID NO: 2352 - protein, 170 aa, Neisseria meningitidis
MNTLQKGFTLIELMIVIAIVGILAAVALPAYQDYTARAQVSEAILLAEGQKSAVTEYYLNHGEWPGNNTSAGVATSSEIKGKYVKSVEVKNGVVTAQMASSNVNNEIKGKKLSLWAKRQNGSVKWFCGQPVTRDKAKAANDDVTAAAAANGKKIDTKHLPSTCRDASDAS

SEQ ID NO: 2353 - protein, 332 aa, Shigella flexneri
MNITTLTNSISTSSFSPNNTNGSSTETVNSDIKTTTSSHPVSSLTMLNDTLHNIRTTNQALKKELSQKTLTKTSLEEIALHSSQISMDVNKSAQLLDILSRNEYPINKDARELLHSAPKEAELDGDQMISHRELWAKIANSINDINEQYLKVYEHAVSSYTQMYQDFSAVLSSLAGWISPGGNDGNSVKLQVNSLKKALEELKEKYKDKPLYPANNTVSQEQANKWLTELGGTIGKVSQKNGGYVVSINMTPIDNMLKSLDNLGGNGEVVLDNAKYQAWNAGFSAEDETMKNNLQTLVQKYSNANSIFDNLVKVLSSTISSCTDTDKLFLHF

SEQ ID NO: 2354 - protein, 257 aa, Salmonella typhimurium
MKAVILAGGLGTRLSEETIVKPKPMVEIGGKPILWHIMKMYSVHGIKDFIICCGYKGYVIKEYFANYFLHMSDVTFHMAENRMEVHHKRVEPWNVTLVDTGDSSMTGGRLKRVAEYVKDDEAFLFTYGDGVADLDIKATIDFHKAHGKKATLTATFPPGRFGALDIRAGQVRSFQEKPKGDGAMINGGFFVLNPSVIDLIDNDATTWEQEPLMTLAQQGELMAFEHPGFWQPMDTLRDKVYLEGLWEKGKAPWKTWE

SEQ ID NO: 2355 - protein, 327 aa, Escherichia coli
MSISDNNMSGRSHDPEQIDLIDLLMQLWRGKVTIIICIVVAIALAVGYLAVAKEKWTSIAIVTQPDAGQLASYNNAMDVLFGANAPEMTDVQAGFIGRFSSAFSALAETLDNQQEPEKLSIDAAVKGQTLPLKVSYTGKTSEEAQKTLAQYIQQVDEGVAKELNADLSMSMETRLADLQKSLAAQEAVAKEQKTLRIAQMTQALKVAQQSNIKLPQVQQVDQVSQDSMFMLGSEALSSMVENEATRPLTFSDQYYQTRQNLLEVQALEVAPDSVHAYRYVMKPTLPIRRDSPKKAITLVLAVLIGGMIGAGVVLGRNALRGYKAKAE

SEQ ID NO: 2356 - protein, 295 aa, Coxiella burnetii
MKPTYCGYAAIIGRPNVGKSTLLNQLLEQKISITSRKPQTTRYQILGVKTFKDIQVIYVDTPGLHAGTERTINRYMNRTARGALRDVDAIVFVIEPHWESQDAWVLDNLKEIETPVFLVINKVDKIKNRAELLPLIEKVSSLYAFQKITPLSAKTGDQVGTLEQAVHQLMPESPFYFPPEQVTDRSDQFMASEIIREKLMRLLGQEIPYSLAVTLIEFRKEEKIIRISAVIWVEKKSQKGIVIGKGGERLKRVGTNARLDMEKWFGKRVFLQLWVKVKSGWADNERLLRELGFEE

SEQ ID NO: 2357 - protein, 357 aa, Pasteurella multocida
MLLSLIVTFLGAFLTLLFMRPIAQKIGLVDKPNFRKRHQGAIPLIGGVSLFVGNLCFYLLEWEQMRLPTLYLFSIFVLLVIGMIDDRFDISPFLRAGIQAILAILMIDLGNLYLDHLGQILGPFQLTLGSIGLIITVLATIAAINAFNMIDGIDGLLGGLSSVAFVSIGILLIKDNQLDLAYWSFALIIAILPYFMMNLGIPFGQKFKVFMGDAGSTLIGFTIIWILLLSTQGKGHPMNPVTALWIIAIPLIDMIAIMYRRLRKGKSPFRPDRLHVHHLMMRAGLTSRQAFLLITFAAAICATIGILGEIFYINEWLMFAGFILLFFMYSYSITRAWRITRWIRRMRRRAKRIHNKG

SEQ ID NO: 2358 - protein, 267 aa, Staphylococcus aureus; identical to SEQ ID NO: 1356

SEQ ID NO: 2359 - protein, 376 aa, Salmonella typhi
MKVLTVFGTRPEAIKMAPLVHALEKDPHFEAKVCVTAQHREMLDQVLTLFSIVPDYDLNIMQPGQGLTEITCRILERLKPILADFKPDVVLVHGDTTTTIATSLAAFYQRIPVGHVEAGLRTGDLYSPWPEEANRTLTGHLAMYHFAPTENSRQNLLRENIPDERIFVTGNTVIDALIWVRDRVLTSDTLQAELAEQYPFLNANKKMILVTGHRRESFGQGFEHICQALAEIAAANQNVQIVYPVHLNPNVSEPVNRILGHVENVVLIEPQDYLPFVWLMNHAWLILTDSGGIQEEAPSLGKPVLVMRETTERPEAITAGTVRLIGTDSRRIVAEVMRLLHDENEYQTMSRAHNPYGDGQSCARILQALKSYRVSL

SEQ ID NO: 2360 - protein, 189 aa, Mycobacterium bovis; identical to SEQ ID NO: 1945

SEQ ID NO: 2361 - protein, 222 aa, Francisella tularensis
MARFHIILGLVVCFFAWIFFLIFPNLDIQFAGHFYNSSAHQFIGGYDGFLGFLHWFARFFPIFFSIIVILFLLGSLFIDKFKIKYRKAIFFIAVCLWIGPGLVVNYVFKDHWGRPRPVMVEQFNGDKIFQPPFVISSQCDKNCSFVCGDASMGFWLFAFMPLLATRKKKLVAFIAAVVAGGGLGLMRMSQGGHFFSDVVFCGIFVYISTWVVYALMYRKKEY

SEQ ID NO: 2362 - protein, 478 aa, Salmonella muenchen
MKNIYNTYDVINKSGINFGTSGARGLVTDFTPEVCARFTISFLTVMQQRFSFTTVALAIDNRPSSYAMAQACAAALQEKGIKTVYYGVIPTPALAHQSISDKVPAIMVTGSHIPFDRNGLKFYRPDGEITKDDENAIIHVDASFMQPKLEQLTISTIAARNYILRYTSLFPMPFLKNKRIGIYEHSSAGRDLYKTLFKMLGATVVSLARSDEFVPIDTEAVSEDDRNKAITWAKKYQLDAIFSTDGDGDRPLIADEYGNWLRGDILGLLCSLELAADAVAIPVSCNSTISSGNFFKHVERTKIGSPYVIAAFAKLSANYNCIAGFEANGGFLLGSDVYINQRLLKALPTRDALLPAIMLLFGSKDKSISELVKKLPARYTYSNRLQDISVKTSMSLINLGLTDQEDFLQYIGFNKHHILHSDVTDGFRITIDNNNIIHLRPSGNAPELRCYAEADSQEDACNIVETVLSNIKSKLGRA

SEQ ID NO: 2363 - protein, 326 aa, Escherichia coli
MRVENNNVSGQNHDPEQIDLIDLLVQLWRGKMTIIISVIVAIALAIGYLAVAKEKWTSTAIITQPDVGQIAGYNNAMNVIYGQAAPKVSDLQETLIGRFSSAFSALAETLDNQEEREKLTIEPSVKNQQLPLTVSYVGQTAEGAQMKLAQYIQQVDDKVNQELEKDLKDNIALGRKNLQDSLRTQEVVAQEQKDLRIRQIQEALQYANQAQVTKPQIQQTGEDITQDTLFLLGSEALESMIKHEATRPLVFSPNYYQTRQNLLDIESLKVDDLDIHAYRYVMKPMLPIRRDSPKKAITLILAVLLGGMVGAGIVLGRNALRNYNAK

SEQ ID NO: 2364 - protein, 284 aa, Mycobacterium bovis; identical to SEQ ID NO: 1248

SEQ ID NO: 2365 - protein, 246 aa, Yersinia pestis; identical to SEQ ID NO: 1495

SEQ ID NO: 2366 - protein, 236 aa, Mycobacterium bovis; identical to SEQ ID NO: 1482

SEQ ID NO: 2367 - protein, 464 aa, Escherichia coli
MSSPLIPVILSGGNGTRLWPLSREEYPKQFLKLTDSISMLQSTISRLDSLNTSSPVVICNELHRFIVAEQLRHLNKLDNNIILEPSGRNTAPAICIAALILKMKHPNENPLMLVLPADHSVKKVKTFCNTIKSAIPFAEAGNLVSFGIKPTHPETGYGYIQKGKVLSDSDIYEVSEVRTFVEKPNLKTAESFIEKDEYYWNSGMYLFSVERYLQELSLYRPDIVKVCQETVKNIHYDMDFIRLDDKIFRNCPQESIDYAVMEKTKDAVVATMDIGWNDVGAWSSLWELGKKDSSGNVITGDIVCHETENSYIYTESGLVATIGIQDLVIIHTKDSLLVSRRDSVQNVKNIVQHLDLSGRKEHKEHREVFKSWGRCDSIDSSEKYHYQVKRITVNPSENYRCNYIITVRNIGVVVMGIAKLTVAEEIKILKENESVYIPAGIKHSLKILDNTTCVNRSLDRFLSC

SEQ ID NO: 2368 - protein, 299 aa, Candida albicans
MNYLLFCLFFAFSVAAPVTVTRFVDASPTGYDWRADWVKGFPIDSSCNATQYNQLSTGLQEAQLLAEHARDHTLRFGSKSPFFRKYFGNETASAEVVGHFDNVVGADKSSILFLCDDLDDKCKNDGWAGYWRGSNHSDQTIICDLSFVTRRYLTQLCSSGYTVSKSKTNIFWAGDLLHRFWHLKSIGQLVIEHYADTYEEVLELAQENSTYAVRNSNSLIYYALDVYAYDVTIPGEGCNGDGTSYKKSDFSSFEDSDSGSDSGASSTASSSHQHTDSNPSATTDANSHCHTHADGEVHC

SEQ ID NO: 2369 - protein, 306 aa, Saccharomyces cerevisiae
MERLQRLMMNSKVGSADTGRDDTKETVYISSIALLKMLKHGRAGVPMEVMGLMLGEFVDDYTVNVVDVFAMPQSGTGVSVEAVDDVFQAKMMDMLKQTGRDQMVVGWYHSHPGFGCWLSSVDVNTQKSFEQLNSRAVAVVVDPIQSVKGKVVIDAFRLIDTGALINNLEPRQTTSNTGLLNKANIQALIHGLNRHYYSLNIDYHKTAKETKMLMNLHKEQWQSGLKMYDYEEKEESNLAATKSMVKIAEQYSKRIEEEKELTEEELKTRYVGRQDPKKHLSETADETLENNIVSVLTAGVNSVAIK

SEQ ID NO: 2370 - protein, 225 aa, Schizosaccharomyces pombe
MSQSQFDPYVQNGGTTVAIAGDGFAILAGDTRSVNGYNINTRFQPRVHEVGDDLVIGASGFEADALALVKRIQQRIDLYHDNHERKMSAQSCACMVRTLLYGKRFFPYYVYTTVAGIDKEGKGEIYSFDPVGSYEREWCRAGGSAANFITPFLDNQVNLHNQYVPGSHGKERKPRRLLKLEEAMKITTDAFTSAGERHIEVGDSVLVKIITKEGVETRIIPLKKD

SEQ ID NO: 2371 - protein, 1018 aa, Saccharomyces cerevisiae
MAGQPTISRFFKKAVKSELTHKQEQEVAVGNGAGSESICLDTDEEDNLSSVASTTVTNDSFPLKGSVSSKNSKNSEKTSGTSTTFNDIDFAKKLDRIMKRRSDENVEAEDDEEEGEEDFVKKKARKSPTAKLTPLDKQVKDLKMHHRDKVLVIRVGYKYKCFAEDAVTVSRILHIKLVPGKLTIDESNPQDCNHRQFAYCSFPDVRLNVHLERLVHHNLKVAVVEQAETSAIKKHDPGASKSSVFERKISNVFTKATFGVNSTFVLRGKRILGDTNSIWALSRDVHQGKVAKYSLISVNLNNGEVVYDEFEEPNLADEKLQIRIKYLQPIEVLVNTDDLPLHVAKFFKDISCPLIHKQEYDLEDHVVQAIKVMNEKIQLSPSLIRLVSKLYSHMVEYNNEQVMLIPSIYSPFASKIHMLLDPNSLQSLDIFTHDGGKGSLFWLLDHTRTSFGLRMLREWILKPLVDVHQIEERLDAIECITSEINNSIFFESLNQMLNHTPDLLRTLNRIMYGTTSRKEVYFYLKQITSFVDHFKMHQSYLSEHFKSSDGRIGKQSPLLFRLFSELNELLSTTQLPHFLTMINVSAVMEKNSDKQVMDFFNLNNYDCSEGIIKIQRESESVRSQLKEELAEIRKYLKRPYLNFRDEVDYLIEVKNSQIKDLPDDWIKVNNTKMVSRFTTPRTQKLTQKLEYYKDLLIRESELQYKEFLNKITAEYTELRKITLNLAQYDCILSLAATSCNVNYVRPTFVNGQQAIIAKNARNPIIESLDVHYVPNDIMMSPENGKINIITGPNMGGKSSYIRQVALLTIMAQIGSFVPAEEIRLSIFENVLTRIGAHDDIINGDSTFKVEMLDILHILKNCNKRSLLLLDEVGRGTGTHDGIAISYALIKYFSELSDCPLILFTTHFPMLGEIKSPLIRNYHMDYVEEQKTGEDWMSVIFLYKLKKGLTYNSYGMNVAKLARLDKDIINRAFSISEELRKESINEDALKLFSSLKRILKSDNITATDKLAKLLSLDIH

SEQ ID NO: 2372 - protein, 427 aa, Coccidioides posadasii
MRFLIGALLTLQTLVQASSMSSMPNSYPVPEAPAEGGFRSVVYFVNWAIYGRGHNPQDLKADQFTHILYAFANIRPSGEVYLSDTWADTDKHYPGDKWDEPGKNVYGCTKQMYLLKKNNRNLKTLLSIGGWTYSPNFKTPASTEEGRKKFADTSLKLMKDLGFDGIDIDWEYPEDEKQANDFVLLLKACREALDAYSAKHPNGKKFLLTIASPAGPQNYNKLKLAEMDKYLDFWNLMAYDFSGSWDKVSGHMSNVFPSTTKPESTPFSSDKAVKDYIKAGVPANKIVLGMPLYGRAFASTDGIGTSFNGVGGGSWENGVWDYKDMPQQGAQVTELEDIAASYSYDKNKRYLISYDTVKIAGKKAEYITKNGMGGGMWWESSSDKTGNESLVGTVVNGLGGTGKLEQRENELSYPESVYDNLKNGMPS

SEQ ID NO: 2373 - protein, 427 aa, Coccidioides immitis
MRFLIGALLTLQTLVQASSMSSMPNSYPVPEAPAEGGFRSVVYFVNWAIYGRGHNPQDLKADQFTHILYAFANIRPSGEVYLSDTWADTDKHYPGDKWDEPGNNVYGCIKQMYLLKKNNRNLKTLLSIGGWTYSPNFKTPASTEEGRKKFADTSLKLMKDLGFDGIDIDWEYPEDEKQANDFVLLLKACREALDAYSAKHPNGKKFLLTIASPAGPQNYNKLKLAEMDKYLDFWNLMAYDFSGSWDKVSGHMSNVFPSTTKPESTPFSSDKAVKDYIKAGVPANKIVLGMPLYGRAFASTDGIGTSFNGVGGGSWENGVWDYKDMPQQGAQVTELEDIAASYSYDKNKRYLISYDTVKIAGKKAEYITKNGMGGGMWWESSSDKTGNESLVGTVVNGLGGTGKLEQRENELSYPESVYDNLKNGMPS

SEQ ID NO: 2374 - protein, 278 aa, Nosema bombycis
MNILLATASFVLSLGFVKAEPTRHHDRYAYIERVVCDVNFPDLLCRRKSHAIAYRMFRLIPVRNPNYEISTDYVSHEFNTTRVRSESEKYLCSSYGPNGYVSGDVFILRNALNKLFDHHEIEELAYELFIRLVASFLDSCSYPKSFEHNLVRCRSEDEELCTSPLAAFIKLVSRRSTRDVVLIVLNDFSHYLKLEEGHGFSKDRKSNQCVKFTQLYFYYLSAAVNFIERKISAFTLIPVMDDRRIASVSAIMISSKFANTTGNYVINATSFMDNTIPF

SEQ ID NO: 2375 - protein, 2135 aa, Neosartorya fumigata
MPSVVALDLCQLFDRSVARTPHQLAVDHESGSLTYTELDVASSNLARKLKQEGVVPGEAVLLLTEHGTRNVVALLAILKAHACYVPLDRSSWSSERIQAVLDGTDSRILINTTVEPFESPRHKVIHLTSADVTTLSTDRSTTKVIPDIAPEDLACLIFTSGSTGVPKGVMIPHRAVANYAQTSPFNMDVQPGDRVLHILSVSFDASTGMLFSILGNSGIVVPATMDTLFDKAQSCSILASTPSILATLPLPTALPDSYPYVHTILLGGESPPAPLLSSWLQFGVRILNAYGPTETTCASLMQEVEVCQETGMINRSIIGRPMPNGPVYLLQPDTLLPVEEEGEEGEIAIAGVGLAHGYYRNAALTAEKFIEWHGKRVYRTGDQGRWTRRNDGQRVVEFRGRSDRTVKNRGFLVNLPADVEEPLRQMGFGVTDVYASLINGLLVALVTPATADLDGLQSEADRRLSSFHRPGRYLAVDQFPLSANGKIDTKAIENMLKEYQARLCEGTDDEETTGGERPTEREQVIAECMYTALGLDLPSASASKDFNFFAMGGNSLAALRFTSLCRERGILLTTRDLYLHPTVRGILPYARDLAHSGLPLPDKEEQIDHRLSLKAEVAAALHLLGDIDVAPLTPLQLQLSAPIFQSDGTNTNQLRQSYPLASAEHICNAWRQVVLSEPVFRTQIALDIGPGVQIVHAQPRCQPQEITFHRREDYNAALSDPSRLPVGLGMRLEFMKFMPNDDDDDEGEVTVVWTAHHSLIDGYSLGLILARVQQASQGVASSRVSSFVDAAWNLLSVQKQRDTEARRFWEQYLQPVRSLTKAEATTTPVARPYLAQEVLFKHVGGVDELHRLASSCSVTLAAVYYTAWAMTIARTTKSTLVTLGVVFSGREILPDDAQAVGPLMATLPLVCRIDGEASIERQLQTTFEGLATISTYAWSAPDQIGYRVDSLLATQYDFPTYDQPIPPQKEQFFENTTFALSLLVEADARFRLVYNPSVHGEQTVQQYADTFQQALQALVGDSTMEAWLTGPTKAPLAVDQASDIQHVNVPNVASAFYASVDLHKDLIAVDGPGGTLPYRELDQKSNAVASHIAKHFSRAQVIAIHADGTLNWVVGILGILKAGCAYCPLDPAYPIARRVAVYEQSGASALLIPNACSSSAALLPITDLRVFTIQETETSDTSRQPSLLANANEDALIVFTSGTTGRPKGVPISHRGLLALQSNPEATMFSRPGRRIAQFMSPAFDYCANEIFSALLHGGTLVLRDPSDPLAHLAKVDVSTITPSVLSVLNPDDYPNLDMVYATGEPVTPGLLARWGEGRAFYNAYGPAECSICTSFTRLEPGQQVTIGNAVRTARMYILDPDLQPVSDGQTGEIFLAGQQVMRGYVGDDAKTAYSVLPDPWHPGERMYRTGDYGYWNADRQIVYIGRLDRQVKIRGFRVELAAVEQKMYQEEPRLTQAAALVVNDTLVAFVMPLDVDVSRLEQRLRESLQPSWVPQVITALEEFPWTANRKVDYRKLAERATLTRPEDSLPQQKTPAGMTAKDASIADGIATLWKNVLRLQAGGGSRKLCEDDDFRALGGHSVLQMMLAARLGSTFGISVSMRDVIEHSTLAEQVELVRRKRQASTAKPRTICDAFPDHCLSPLERQTWFQYLIAADVRTFNIPVLLHLGGTFDRDRLVQSFNAVLASRKIFRTNFVETSLGPCRIFRDTPPRVLVCDGALDTTKEIDRSFDLARDELIRVFLDRRTLLVVTSHAVADLNSVQNLLQDVSGVYAGRTTPTPDRWHYPRAPAWSRQATEQERKFWSKYLEGAPQRLDIPRYPGQMAFEGRSRVSEFKGDLVRRAVTLGQEHGLSQHQLVCAAVAQTLQWLAGSNDVVLGSPWANRGHTVEQESMGLFLDRLPLRFKTPVNADCATILQSTRAASQAAVCNSIPFEQVLNLLHLPRTIRQHPLFEAMVTFHLKGAVEDCLAIEGLEVKREMCFASGAKFLLMFEWTEIEADHWTLRIEYDDHQLDDATVTTIEDSIRCVLEGLADRLSRAAIHERLNAMHKTARTKVDWNFYRRLVGILQREMATCLGVSLDEFPCSVSFFEAGGDSIQAWRLSRQLKRVGLEVPICNIFDHPTAQDLAQRLYRQVL

SEQ ID NO: 2376 - protein, 260 aa, Schizosaccharomyces pombe
MLEARFQQAALLKKLLDAIKELVTDANFDCNDNGISLQAMDSSHVALVSMLIKSDGFEPYRCDRNIALGINLNALSKVLRCAQNEDLVTLKAEDTPEVLNLVFESEKNDRISDYDVKLMDIDQEHLGIPDIEYDATITMPAAEFQRITRDLLTLSDSVTINASKEGVRFSCKGDIGNGSTTLKQHTDLSDQDQSIEISLTQAVTLTFSLKYLAQFTKATPLATRVTLSMSNDVPLLVEYKMESGFLRFYLAPKIGEEDEE

SEQ ID NO: 2377 - protein, 338 aa, Saccharomyces cerevisiae
MSLQHEKVTIAPLVLLSALDHYERTQTKENKRCVGVILGDANSSTIRVTNSFALPFEEDEKNSDVWFLDHNYIENMNEMCKKINAKEKLIGWYHSGPKLRASDLKINELFKKYTQNNPLLLIVDVKQQGVGLPTDAYVAIEQVKDDGTSTEKTFLHLPCTIEAEEAEEIGVEHLLRDVRDQAAGGLSIRLTNQLKSLKGLQSKLKDVVEYLDKVINKELPINHTILGKLQDVFNLLPNLGTPDDDEIDVENHDRINISNNLQKALTVKTNDELMVIYISNLVRSIIAFDDLIENKIQNKKIQEQRVKDKQSKVSDDSESESGDKEATAPLIQRKNKKN

SEQ ID NO: 2378 - protein, 3227 aa, Schizosaccharomyces pombe
MRITKSPPKNQYSQPPPRVAEFIRQAQNEEVTSDLGLVSLCSEFRKNDWPYPRGDLYSWVPVLNRFDAILERIVEHYSLKDKVQTKPFDSDTLSILLEILSFSAHLLSHCANRSIYNSTVYLEYLLNSSVLEVIDSTLALLLHIVQKATISKRGKQLFSLSQDRLFRFLMFLPQDAMKTGFSQNYETLLFSNEIPQEWCSLELSYYKSSPSKDFSSASQPNSEGFSILKLPYNKVLGKPIEELLVKTLHDNQIPEQYSFDLLVSLMLRQNLYDINRRRLMIRIGLLALSNLVYAHSQAVQTRFLIADPEITTHLANLVSPDVDLPQNFKAVCFECFKAFFFKKSMIPSVLASLNVSVSYGLMMNLVRDFSKNLENPNFYYEREYVDSFYDFLQFMTSSPLGGNMACSAGLTSLLGYHLSVKTPQATYVVARSIVMLDHLIDGYSMAFPDFSESKGLDMLVDRVQYELEAGLQDIKSGKGNPEIVLNMDYAISYDRYFLLKNLLKFVLHLIQSGGSVVELRNLIDSSLISSLAFLLEHHEVYGSNLFASTTNIMSTFIHNEPTCYGIIHEKKLSHAFLDAVNRKILNSSDAITSIPLAFGAICLNSQGFDLFLEKNPIPQLFSIFTSLNHCKSLISSDNAAILGTYIDELMRHQPSLKDPIVKMIFKACDQVSALLDNFNPFQYINAKEYPYLLYLETFSSFLENIITNEGHARYLISKGIVSHVLNLIQHPVLAFGFIDSSAFNSFFVLLHHAVDFDAPEVFRPLLDCIITRCEEGITEFTIVSLKQATISLIKDSNMGHEDANNFLHFSIVGNLLTIFAELFSSHAALKKAGNLPLVQLFISPSRYAGIFDILCNIKSIATSLDIHICLGVSDDFVLCSDSLTTIVTDKDEKEKFETKKKELTQDSSFCKFQNIRSNFSQIAYGVSKFFTSLTRALGNTSVQDFNEYKMIHKLGSNIALVVDELINLSSKQITSHPQSLSIASLEASLIFVLGASSIIREDDSKVTLVLLISRLLGGCRTMDVLISLNETVSGFFRLSDRDPLSKSNRVLLALSSTLLNLILVFTSADFMSETSKTLNMALKSEFDMTDFNNSGSKLMHVLHARIFISVLHLWRSADDLHLPYITRALLTNVLSNCYQFEDGIKNVVDSINNLRTSIANGDIKEPLDVVTDDNTNSNFSLEETNASVTDMPESEKHENGIFQAYLLKEMPNDIVSQFEMLKSKQIELTVQMASYEGDLNQNLCDFLYTRDDVQMNADVQFSVTSGLIVEIKKLAQSTDCKAKNQLGPAVGLLSLFISHDFTQNKAKNCVLSELNFFLELLHSLNNGLPSDSHKTSIVCILYLLEVLLADSKKPDEFEFNSEDCSLKLTDGAITVDLASQKHIMSSVITLLSLNSANLGVVVSAFRVVVLLTSASEMIHTFVKLSGLPSLFKAMRACSGFCNESLHIPFISILRRLLEFDEVVELMMFDDLVNIFKLQGRARKTELHGFIRANAEMVLRSPECFIKILKDCCVLGHFTPESEHYYLELKESLPGVLQNGQTDLDPSKEQMSSVIVSFLLDELMDLTETRQFSDRSPNSEFTPENDSLYMYNVFLLQCLTELLSGYNACKRCFLNFQPRRKAPFFNLSRKYNSYLVGFFLEKLLPFGCIRLSENNEVRKAFSVSNWAISILVFLCAYSNEQQTQAVDEIRREVLTSVLKFYKSSSSFSENLEAYYCKLLVLAELCYRLCDAQTVSQKAPNHLLRRSQDQNVKTMIDLGYIPTLTNAISEIDMNYPVSRKVVRHILKPLQLLTKEAIFLSQTNPEALSGAAQDSMGDQSLSSSSEESSDSDREEPPDLYRNSVLGIFQGDIVNENDENYEDSEDDGVYEEMEFEDDQSGSADSVVSEDDADDVMYSDNDDMNIEFMVDEQDASSQNDDSSFDEASSHGDVISIDEEDLDNQGEEFEWEDEDNASSGYEDELDYNEDEVGENDSTTFEAMENAFTETSDNDDHLEEADHVSPVEIDFLENDENSSSEQDDEFQWEWNTETPSGADILSRHGALLRDLFPLPGLSRRVMIINSNDPSRSRPFLNNNASEGLLKHPLLLRNNLIHTPKATELWENLAEIDNHTASGAAFQRLLYYLALEIPNEDSSVLGWTSLKVSKHTDPLRATSDFIPLFSMQRWNSITSMFFAHASGSIALRITGSVLFALVPPALEKYNLENQKKEILENESKEEETRQPEVNIQPEEPINTSDMEGVTTEANEIGSYQEPSLINIRGREVDVSSLGIDPTFLLALPEEMREEVVFQHIQERHMESISDSSRRIDPSFLEVLPSDLRDELLFQEAVQMRLFDHATRNNNSVDHEVEMEEIDQGGTVSEHREKSVKPVKKIPVPNLLDRQGLYSLIRLIFISQHNGKNPYYDLIVNISENKQHRADIVGLLLYILQEASINDRASEKCYRDLTVKSLNNSQQKEVKKSTGLLESLCKVPVVNGISAPALILQQGIDLLSHLATWADHFASFFLSMHDFSGIASKKSAGRKNRESNVYKIAPINVLLGLLAREELFGNTLVMNTFSELLSTLTKPLLSFYKSEKLQKDSATTGYTNDQDSRGSTVPKQDPGTTASRKDKKILSPPNILDENLRLAASLITTDSCSSRTFQNALSVMFHLSSIPKAKILIGKELLRHGQEYGNSITNDLSRLCADVKSGKNESELQVALAPFCPASSNQAKLLRCLKALDYIFERRPKGQEQSPGNIIQLLEFYDNLKFSSLWEVLSECLSALRDHTSITHVSTVLLPLIESLMVICRLVFIELPEDVGKHISPILERFKTLFISFTEEHRKIINMMVFTTPSLMSGSFSLLVKNPKVLEFENKRNYFNRQLHEEAAKEQYPPLNITVRRDHVFLDSYRALHFKDADEVKFSKLNIHFRDEEGVDAGGVTREWLQVLARQMFNPDYALFLPVTGDATTFHPNRDSSVNPDHLSFFKFTGRIIGKALYDGRLLDCHFSRAVYKHMLHRSVSVKDIESLDPDYYKSLVWMLNNDITDIITEEFAVEKDVFGEKTVVDLIPNGRNIPVTELNKQNYVNRMVDYKLRESVKDQLKSLLDGFSDIIPSHLIQIFNEQELELLISGLPEIDIDDWKNNTEYHGYNVSSPQVQWFWRAVRSFDEEERAKLLQFATGTSKVPLNGFKELEGMSGFQRFNIHKSYGSLNRLPQSHTCFNQLDLPEYDTYEQLRSMLLTAINEGSEGFGFA

SEQ ID NO: 2379 - protein, 807 aa, Schizosaccharomyces pombe
MSRPIEIANVSSGNRRTLPALHGSSFSSRSELDNNTNSKISRRLRELVCQRMGENPLRLRQSFHETISNDSYGNSEKLVIRPCICCNSVLRYPAQAMCFRCSLCMTVNDVYFCLSGSQIKTKASTDGSQFISVEHFVETIHQTRSALQLAKQRTGNVQAIVAAGLPLRELISLVFGSPPILNKLFSVKNGCSIQSSGLNYKLIYQLYHDITNLDILITNELLRAIESLLRRPMLYCHDPADYQYLLILLENPLLNSKSKNIVNKSSSILKRILGVLSNLNEKTHHFFISCFKKQPYNNPKFFRRKVDLINKFIGQRLMETYSRNKRKHYYNNDWQIKSAAITMALLYSANSQMRLIDRSSFYCIMADFINLYHDFELWEQKINCFCFCQYPFLLSMGAKISILQLDARRKMEIKAREAFFSSILSKMNVEPYLMIRVRRDRLLEDSLRQINDRNKDFRKALKVEFLGEEGIDAGGLKREWLLLLTRKVFSPEFGLFVNCEESSNYLWFNYSHRSKEIDYYHMSGILMGIAIHNSINLDVQMPRAFYKKLLQLPLSFNDLDDFQPSLYRGLKELLLFEGDVKNTYGLNFTINLKAVEGFRTVELKEGGSELSVDNENRKEYVLRYVDYLLNTTVKKQFSAFFDGFMKVCGGNAISLFQDNEISKLIRGSEEVIDWELLKNVCVYDFYDQNAISNSISESEPSMTASKYLCHSFVSKRKIILWFWDLISHYSLKMQKLFLIFVTGSDRIPATGAHNFQLRISVLGPDSDQLPISHTCFNHLCIWEYSSREKLKKKLDTALLETNGFNIR

SEQ ID NO: 2380 - protein, 1014 aa, Saccharomyces cerevisiae
MLRFVSSQTCRYSSRGLLKTSLLKNASTVKIVGRGLATTGTDNFLSTSNATYIDEMYQAWQKDPSSVHVSWDAYFKNMSNPKIPATKAFQAPPSISNFPQGTEAAPLGTAMTGSVDENVSIHLKVQLLCRAYQVRGHLKAHIDPLGISFGSNKNNPVPPELTLDYYGFSKHDLDKEINLGPGILPRFARDGKSKMSLKEIVDHLEKLYCSSYGVQYTHIPSKQKCDWLRERIEIPEPYQYTVDQKRQILDRLTWATSFESFLSTKFPNDKRFGLEGLESVVPGIKTLVDRSVELGVEDIVLGMAHRGRLNVLSNVVRKPNESIFSEFKGSSARDDIEGSGDVKYHLGMNYQRPTTSGKYVNLSLVANPSHLESQDPVVLGRTRALLHAKNDLKEKTKALGVLLHGDAAFAGQGVVYETMGFLTLPEYSTGGTIHVITNNQIGFTTDPRFARSTPYPSDLAKAIDAPIFHVNANDVEAVTFIFNLAAEWRHKFHTDAIIDVVGWRKHGHNETDQPSFTQPLMYKKIAKQKSVIDVYTEKLISEGTFSKKDIDEHKKWVWNLFEDAFEKAKDYVPSQREWLTAAWEGFKSPKELATEILPHEPTNVPESTLKELGKVLSSWPEGFEVHKNLKRILKNRGKSIETGEGIDWATGEALAFGTLVLDGQNVRVSGEDVERGTFSQRHAVLHDQQSEAIYTPLSTLNNEKADFTIANSSLSEYGVMGFEYGYSLTSPDYLVMWEAQFGDFANTAQVIIDQFIAGGEQKWKQRSGLVLSLPHGYDGQGPEHSSGRLERFLQLANEDPRYFPSEEKLQRQHQDCNFQVVYPTTPANLFHILRRQQHRQFRKPLALFFSKQLLRHPLARSSLSEFTEGGFQWIIEDIEHGKSIGTKEETKRLVLLSGQVYTALHKRRESLGDKTTAFLKIEQLHPFPFAQLRDSLNSYPNLEEIVWCQEEPLNMGSWAYTEPRLHTTLKETDKYKDFKVRYCGRNPSGAVAAGSKSLHLAEEDAFLKDVFQQS

SEQ ID NO: 2381 - protein, 149 aa, Clitocybe nebularis
MSITPGTYNITNVAYTNRLIDLTGSNPAENTLIIGHHLNKTPSGYGNQQWTLVQLPHTTIYTMQAVNPQSYVRVRDDNLVDGAALVGSQQPTPVSIESAGNSGQFRIKIPNLGLALTLPSDANSTPIVLGEVDETSTNQLWAFESVSAV

SEQ ID NO: 2382 - protein, 450 aa, Encephalitozoon cuniculi
MMKLSLLLGLVSFSAVLASENRRGNCQMCPEGTRYFEKNNLLGRRFKNDVRKLCGDGMSSDVHDESSSHSSSSSDCKPRRRRHHRRYEDSCSFGSSDCDDSSTYSSCVSSECSPPCRPVPLNCDYELKTPIINMGERIFEFLKNYEDQYKKAVVLFLTRILSQIDGFAPSYPSADYEPLIEQLETLGVTVPSNMAADLAALDAAEATSLAGTIRANAQKVIGDLLARVNTMCYLDLMSLVTSGLFASQVTSAFSNTQPIITIAGNDLFTKQMAVFQRLPGTLPSAAITAITNALQANKNNFVTFFTTQTTNLQTDVQNALTALITALTTLTSTTSTEFTQFANSEIGALTGRIFGSSGSGSGGSSGGSSGSGSDGSGSGGSSGGSSGSGSDGSGSGGSSGGSSGSGSDGSGSGGSSGGSSGSGSDGSGSGGSSGGSSGSGSGGESGGSSS

SEQ ID NO: 2383 - protein, 512 aa, =Neosartorya fumigata
MAFTLTILVPCMVLALVAARPVLYWVLSVVIDAFLRWKYPLPHHAGSKPMPRARYTWPNGQGTEKFFNGRSAARQWRQRWGPIYQIWSGWCPEIVLTTPTHAVQFFRNSHRHTKAVNNDSGWLFGEVLGVCVGLLSGTDWKRVRQQVEDGFSRPTAARYTGDLVFLAREYLQNTLLASSEQSLENKGIIHVEPAKTLQFYPFLSVAQILFGRLSPMQRTQLTTLAPLREELFKEVIRGGINRLSIAPWFKSRGVRLLNEFQTQWEQFVEDAYHAAVKRNQSPRPLVIGLWEAYQAGTISKRECLQTLDESLYANLDVTTHALSWNVLLLAENGEAQTELRQEVLSALQSEASESYERYIDRDDTFLAACILESARLRPILPFSNPESAPEDLYVDGYLIPANTNVIVDAQAINIDNPYWVNGTQYNPRRFFSLNKSDVRHNMWRFGFGPRQCLGKHIGERMLKAIVAEIIRQYVISISADSALKNDLQEDSWVGLPATRIQCVPVGREVEKN

SEQ ID NO: 2384 - protein, 258 aa, Saccharomyces cerevisiae
MLEAKFEEASLFKRIIDGFKDCVQLVNFQCKEDGIIAQAVDDSRVLLVSLEIGVEAFQEYRCDHPVTLGMDLTSLSKILRCGNNTDTLTLIADNTPDSIILLFEDTKKDRIAEYSLKLMDIDADFLKIEELQYDSTLSLPSSEFSKIVRDLSQLSDSINIMITKETIKFVADGDIGSGSVIIKPFVDMEHPETSIKLEMDQPVDLTFGAKYLLDIIKGSSLSDRVGIRLSSEAPALFQFDLKSGFLQFFLAPKFNDEE

SEQ ID NO: 2385 - protein, 421 aa, Schizosaccharomyces pombe
MSSKSSLELANNAVKSNDIEKAIDLYKEVLNKGVSKDEKVANEQEQALTNLSDLYVRENRHNDLAQLVQQSRPLMANFSKAKSAKIVRTLIDKFSGEKKSLPLQIEVANDCIKWAIKEKRTFLRQALETKLISLYYDNSSYTDAINLINTLLSELKRMDDKMLLTEVHLLESKVYHAIRNIPKARASLTAAKTSANAVYCPPMLQGNLDLQSGILHADDMDFKTAYSYFYEAYEGFTSLDDDKKALSSLKYMLLSQIMLNSVSEVKSLLTGKHAIRYAGRDIEAMRAIAQAHENRSLADFEKALQDYKPELASDPIIRSHLSSLYDNLLEQNLLRVVEPFSRVEVSHIAELIGLSTVQVEGKLSQMILDKIFYGILDQGSGCLIVYDEPQQDKTYEAALEVIKNMGTVVDLLIENKASALL

SEQ ID NO: 2386 - protein, 437 aa, Saccharomyces cerevisiae
MSEEQDPLLAGLGETSGDNHTQQSHEQQPEQPQETEEHHEEEPSRVDPEQEAHNKALNQFKRKLLEHRRYDDQLKQRRQNIRDLEKLYDKTENDIKALQSIGQLIGEVMKELSEEKYIVKASSGPRYIVGVRNSVDRSKLKKGVRVTLDITTLTIMRILPRETDPLVYNMTSFEQGEITFDGIGGLTEQIRELREVIELPLKNPEIFQRVGIKPPKGVLLYGPPGTGKTLLAKAVAATIGANFIFSPASGIVDKYIGESARIIREMFAYAKEHEPCIIFMDEVDAIGGRRFSEGTSADREIQRTLMELLTQMDGFDNLGQTKIIMATNRPDTLDPALLRPGRLDRKVEIPLPNEAGRLEIFKIHTAKVKKTGEFDFEAAVKMSDGFNGADIRNCATEAGFFAIRDDRDHINPDDLMKAVRKVAEVKKLEGTIEYQKL

SEQ ID NO: 2387 - protein, 146 aa, Coccidioides posadasii
MKFSLLSAIAAAVFVPFTSATPLASTADLSYDTHYDDPSLPLSGVTCSDGDNGMITKGYNTAGEIPNYPHVGGAFTVETWNSPNCGKCYKVTYNAKTIFLTAIDHSNSGFNIAKKSMDVLTNGRAEELGRIKVTYEEVASSLCGLK

SEQ ID NO: 2388 - protein, 361 aa, Schizosaccharomyces pombe
MSTVEDQLSLELETVNKDILLKKALLHYKDAIKSEREGNLGESLNKYRLAHKVHEDVESIYRRLERLQLCKRNEEEEMLNSDASEAMLTVSSVPSPTLTENESVNESVVPNILKLPDEVLLVILENCIRDLHDLRYLSSIALTCKHFAKALRADSLYRSFCYCSCEQKEWQQSIKSIEEELVEKYQQSWKTLFLKKPRSRFDGCYISVCRYFRPGTSDTSWNQPIHLITYYRYLRLYPNSTCIVYQSSNEPNDVVRNFSVQNTSLFSPMSSSPMFSNGNVALTGSWSMTPSGEMLIVYPASQTYTYVQKLQVRGIRLKWISFYSIHNYTSFTNEMPLTHNRDYVFSRVYSYTADSESLKRG

SEQ ID NO: 2389 - protein, 910 aa, Saccharomyces cerevisiae
MLNFTGQTRRRNVNLGNRTRNSKKDLLEKAKRERERRAQDKLKEDASKTIQKSIRRHFSNVRLFKNTFTSSQLVHMIPAYGGKLIYYISQYDLQQLLKLSHNFLSSYPNSLGNRQLLSLLKLYQDDALVAETLSDLNMDCPTVDEFLDSLSVYLCRASFLSYSSASKLADVIEAWEVMHSSASISIFSISIGSYEKRPFALQFYCILAERNLLPQLINTNPILWDNMAKTYSHCSKGGQKNIAKLLIPNFNNHIAPSVLRSDNDYVLKFYEKAFIDEVIATTANYVSDEDHVKNLMCYIASSPNQSCKNSVLITLLSNKDFVRRLSWEFFHTKFNASKTEAHPLFSVLAQLIDMHLLISTDRELLDYNSVIPIEELKKFTSTLKDFTFRQYWELPKSERNPMLKEAVPLLSKVYERDSRLHFLSTENNPTYWENSEKQFLNLRFYEELQEYEDLYREHLEEESDEDMEKEIDLDKERPPLKSLLLNKMKKRLKSSLRFRKLEILLELPFFIPFEERVDLFYMFIALDKKRLSLDDDHNLINMFTPWASTGMRKQSAIISRDNVLEDAFNAFNSIGERFKASLDVTFINEFGEEAGIDGGGITKEFLTTVSDEGFKDPKHELFRTNDRYELYPSVVYDATKLKYIWFLGKVVGKCLYEHVLIDVSFADFFLKKLLNYSNGFLSSFSDLGSYDSVLYNNLIKLLNMTTDEIKSLDLTFEIDEPESSAKVVDLIPNGSKTYVTKDNVLLYVTKVTDYKLNKRCFKPVSAFHGGLSVIIAPHWMEMFNSIELQMLISGERDNIDLDDLKSNTEYGGYKEEDQTIVDFWEVLNEFKFEEKLNFLKFVTSVPQAPLQGFKALDPKFGIRNAGTEKYRLPTASTCVNLLKLPDYRNKTILREKLLYAINSGARFDLS

SEQ ID NO: 2390 - protein, 388 aa, Encephalitozoon intestinalis
MIKLSLLLSLASFTAVLANQRPRCQRCPVSSSKYFQQNNLLGSRFQNEVQRLCARRVREESSSESSSSSSSEDCSRRRRRPHREWEDSCSSSYSSCSSTDSCSSSAPCPPPVAQRCDIELKTPIILMGERIYEFLKNYEDQYKKAVLLFLTNILSQISGFNPVFPGGDYDALIEQLKTLGVTVPANTAAELAAIDAAESSALTRAIQANAQKVISDLLTRVSAMCYLDIMSLVNSGLLASQVSSVFNNIQPIITITGNDLFAKQMAVFQKIPGTLPSAAITAITNALQGNRTNFVTFFTTQTSNLQTSVQNSLTTLISELEKLATDTETAFTAFANAEISALISRIFPTSTTSSGSGDSTGSGSTGDAGDAGDTGEDGGDDEGTEGTG

SEQ ID NO: 2391 - protein, 282 aa, Neosartorya fumigata
MTVLPDSENGYLLNYEDQEKRRMNMQHDLIKTYMGKLILAPLPFDQPNLRVLDSGTFNGLWLEDASTLLQSPTLVGTDVSPTAFPAKRPPNTEFHVQSISDPWPTEWRDSFDLVHQKLVIACVPPDEGRQALYRLIDLAKPGTGWVQFTEGSLEHLTPEQRKQYPVLARFQSLVAEMLPHFRWNPRPGKLVRQWLEEYGLQEVQEKVMEIPIGAGNPDPKLGEMAKQNMLEVVSNFRTAATRLPDGTGIRAEDFDPILRDIKVEFETVGGILRFNTVWGRRP

SEQ ID NO: 2392 - protein, 427 aa, Coccidioides posadasii
MRFLIGALLTLQTLVQASSMSSMPNYYPVPEAPAEGGFRSVVYFVNWAIYGRGHNPQDLKADQFTHILYAFANIRPSGEVYLSDTWADTDKHYPGDKWDEPGNNVYGCIKQMYLLKKNNRNLKTLLSIGGWTYSPNFKTPASTEEGRKKFADTSLKLMKDLGFDGIDIDWEYPEDEKQANDFVLLLKACREALDAYSAKHPNGKKFLLTIASPAGPQNYNKLKLAEMDKYLDFWNLMAYDFSGSWDKVSGHMSNVFPSTTKPESTPFSSDKAVKDYIKAGVPANKIVLGMPLYGRAFASTDGIGTSFNGVGGGSWENGVWDYKDMPQQGAQVTELEDIAASYSYDKNKRYLISYDTVKIAGKKAEYITKNGMGGGMWWESSSDKTGNESLVGTVVNGLGGTGKLEQRENELSYPESVYDNLKNGMPS

SEQ ID NO: 2393 - protein, 434 aa, Saccharomyces cerevisiae
MSLPGSKLEEARRLVNEKQYNEAEQVYLSLLDKDSSQSSAAAGASVDDKRRNEQETSILELGQLYVTMGAKDKLREFIPHSTEYMMQFAKSKTVKVLKTLIEKFEQVPDSLDDQIFVCEKSIEFAKREKRVFLKHSLSIKLATLHYQKKQYKDSLALINDLLREFKKLDDKPSLVDVHLLESKVYHKLRNLAKSKASLTAARTAANSIYCPTQTVAELDLMSGILHCEDKDYKTAFSYFFESFESYHNLTTHNSYEKACQVLKYMLLSKIMLNLIDDVKNILNAKYTKETYQSRGIDAMKAVAEAYNNRSLLDFNTALKQYEKELMGDELTRSHFNALYDTLLESNLCKIIEPFECVEISHISKIIGLDTQQVEGKLSQMILDKIFYGVLDQGNGWLYVYETPNQDATYDSALELVGQLNKVVDQLFEKASVLY

SEQ ID NO: 2394 - protein, 428 aa, Saccharomyces cerevisiae
MEELGIVTPVEKAVEEKPAVKSYASLLAQLNGTVNNNSALSNVNSDIYFKLKKLEKEYELLTLQEDYIKDEQRHLKRELKRAQEEVKRIQSVPLVIGQFLEPIDQNTGIVSSTTGMSYVVRILSTLDRELLKPSMSVALHRHSNALVDILPPDSDSSISVMGENEKPDVTYADVGGLDMQKQEIREAVELPLVQADLYEQIGIDPPRGVLLYGPPGTGKTMLVKAVANSTKAAFIRVNGSEFVHKYLGEGPRMVRDVFRLARENAPSIIFIDEVDSIATKRFDAQTGSDREVQRILIELLTQMDGFDQSTNVKVIMATNRADTLDPALLRPGRLDRKIEFPSLRDRRERRLIFGTIASKMSLAPEADLDSLIIRNDSLSGAVIAAIMQEAGLRAVRKNRYVILQSDLEEAYATQVKTDNTVDKFDFYK

SEQ ID NO: 2395 - protein, 612 aa, Candida albicans
MSSFNSNSNPANAQNLSSFQFQPPKEDVIFDTHQMSLSVPQSRYYASSMMQQSQQGQPQSQTSQQQQQQPFLMNIPPAFTQTQPQQMLYAMPPLQTQQPSSSSATTNNVVPPHHYNQQQSQQQQQQQQQYQQMQPQPNNMQFFDNTIPNYLIMNQTISPSQTQTTAQPNISYYNYSTQPQLQSAQPISHSQPQPQPQATQPRSNRSRSQTSFSKPRGSRQVSGSGRSTGAKKQSAITSGSTGTGPARNADTGMTSVANSTSTTTMTTTNNNNKLSVSAPVNVIYANLPERLQQVLPAPPLSRAPVRPDVTVNLTSKRAKRKSKFTPEQDDMIVNLKKKGKSWVEIAEITGVGSYLAARNRFQVIVGQQGNNNSSAWDNTDKLFLNQLLDAGEIEKWRFICCELNKSTNKNFTDYECREMIRQLFWLNPASFGVNEETIIESQKEKKLTEKTIEQREQQRKKRASANHSPPDSDSITNTNNNQQEVKYIDPQYKNYQSQLMPNQNTGSGATKISSTTPPPPSQALSNNVNTMNKNIVSSALGGTSFSQEQHSLHSNQHHHNHQQHPLIHHHQYQQQSSLPPPPTIPSTIPTSSLSIQQQQQQQQQQLYNKQFY

SEQ ID NO: 2396 - protein, 463 aa, Schizosaccharomyces pombe
MRVPNEVCFNILSYLEADELRCKSTVCTSWRNFIIPTLWEKVVFQNEAQLNNFFDTLQYSKDVSYYFRYLRKLNCSRVRKFLTDKHLMLMTLATGISRLNLSGCTRISEPLIGKLLYQNLNLVTINFSNIFSLPANILEYISDNCPNLKALNIGNCGLVEDTGMVQIIKRCPYLNRLIIPNCRKLTDVSLQILSEKEDLIELDISGCEGFHNADTLSRLVSRNRGLKELSMDGCTELSHFITFLNLNCELDAMRALSLNNLPDLKDSDIELITCKFSKLNSLFLSKCIGLTDSSLLSLTKLSQSLTTLHLGHCYEITDIGVQCLLKSCKNITYIDFGGCLRLSDIAVSAIAKLPYLQRVGLVKCICLTDLSVILLSGSFSRNLERVHLSYCIGLTAKSVSYLMYNCKTLKHLSVTGINSILCTELRSFSRPIPDGINPSQVPVFCAFTKVEIDLFREFIRNRI

SEQ ID NO: 2397 - protein, 892 aa, Saccharomyces cerevisiae
MVSLFDKLNAKKDGRDGSVSKELLSHSVAHTKNRLPKSGRRTSERSLAASVKDGSCSNSKSNKRNSSASVSGEEDKSCLISLNCLCCGVPLRFPASITKFRCSACQVTVIVKEPEINSNLESSTHISCTLEGLQMVVRRCHDDLQRLKKTGILDKERKGLIFQPVITYLLDRFHDVSILNRSFLVHDGGKNIKMLNYEVLQRFYSILSNLPTRKPYYSMLCCCNDLLKRITINKGENLQILQYRWLLIILNIPTIRTCLIRDRKSKNVFETQQIRAVSYELAKRCIGYLSNLSTKTSQQLIQSLRRTPTDNFSYQVEILNLYINFQFSRLLSNELSNRTAKNNVKPEDEMRSRLRRHHTTGHEFLSTRPISAQSNDKQGSGFTHPVNNKMKFKFFQYEEDWHIHSAAKLTFIYYVANTRRNGRGALSIQSFYNITLDFIDYKQDFDHWRGVAQKTKMNQLIEEWGNSTTKKCFSFCKYPFILSLGIKISIMEYEIRRIMEHEAEQAFLISLDKGKSVDVYFKIKVRRDVISHDSLRCIKEHQGDLLKSLRIEFVNEPGIDAGGLRKEWFFLLTKSLFNPMNGLFIYIKESSRSWFAIDPPNFDKSKGKNSQLELYYLFGVVMGLAIFNSTILDLQFPKALYKKLCSEPLSFEDYSELFPETSRNLIKMLNYTEDNFEDVFSLTFETTYRNNNWILNDSKSSKEYVTVELCENGRNVPITQSNKHEFVMKWVEFYLEKSIEPQYNKFVSGFKRVFAECNSIKLFNSEELERLVCGDEEQTKFDFKSLRSVTKYVGGFSDDSRAVCWFWEIIESWDYPLQKKLLQFVTASDRIPATGISTIPFKISLLGSHDSDDLPLAHTCFNEICLWNYSSKKKLELKLLWAINESEGYGFR

SEQ ID NO: 2398 - protein, 1002 aa, Encephalitozoon intestinalis
MIKLSLLLSLASFTAVLANQRPRCQRCPVSSSKYFQQNNLLESRFQNEVQRLCARRVREESSSESSSSSSSEDCSRRRRRPHREWEDSCSSSYSSCSSTDSCSSSAPCPPPVAQRCDIELKTPIILMGERIYEFLKNYEDQYKKAVLLFLTNILSQISGFNPVFPGGDYDALIEQLKTLGVTVPANTAAELAAIDAAESSALTRAIQANAQKVISDLLTRVSAMCYLDIMSLVNSGLLASQVSSVFNNIQPIITIAGNDLFAKQMAVFQKLSKTLISTAVTNALQGNRAKFTRFYTTQTSNLQTSVQNSSKTLTSELKKLATDTETAFTAFANAEISTPVRRIFRRSITSSGFEDAEEGEDKDNTGEGEEGEDKDNTGEGEEGEDKDNTGEGEEGEDKDNTGEGEEGEDKDNTGEGEEGEDKDNTGEGEEGEDKDNTGEGEEGEDKDNTGEGEEGEDKDNTGEGEEGEDKDNTGEGEEGEDKDNTGEGEEGEDKDNTGEGEEGEDKDNTGEGEEGEDKDNTGEGEEGEDKDNTGEGEEGEDKDNTGEGEEGEDKDNTGEGEEGEDKDNTGEGEEGEEGEDKDNTGEGEEGEDKDNTGEGEEGEDKDNTGEGEEGEEGEDKDNTGEGEEGEDKDNTGEGEEGEDKDNTGEGEEGEDKDNTGDAEEGEEGEDKDSTGEGEEGEDKDNTGEGEEGEEGEDKDNTGEGEEGEEGEDKDNTGEGEEGEEGEDKDNTGEGEEGEDKDNTGEGEEGEDKDNTGEGDEGEDKDNTGEGEEGEEGEDKDNTGEGEEGEDKDNTGEGEEGEEGEDKDNTGEGEEGEEGEDKDNTGEGEEGEEGEDKDNTGEGEEGEDKDNTGEGEEGEDKDNTGEGEEGEDKDNTGEGEEGEEGEDKDNTGEGEEGEDKDNTGEGEEGEDKDNTGEGEEGEDKDNTGEGEEGEDKDNTGEGEEGEDKDNTGEGEEGEEGEDKDNTGDAEEGEEGEDKDNTGDAEEGEEGEDKDNTEEGEETT

SEQ ID NO: 2399 - protein, 435 aa, Neosartorya fumigata
MPSETITPLLAHRARTNIQWFTHKHMRQVSRLNAKQHRVNMMTAENWSIRDELVDQYKTLFAQHLSPRHLSYADGMGGDAELLQAAADFFNRVFAAHSRVQPAHLVVGAGCSSLLENLLYDICEPGEGVLIETPFWGGFETSFVLRSNVTAVHVRPPCHGNGSADLDRLVSAYIEAYERALRQAPCRIKAILVCNPHNPCGHIYPPRVIQALLQFAQRHDLFYISDEIYALSTLDEQTAFTSVLSIDVAALGVDLARVFTLYSISKDLGSSGLRLGFGITQAHPDLRLSLAISNHSRVSTFTSLVITALLHDPEAATAILHQNRAALQRSAKLISDFLAFHQIPFVPPAAGVYVWARLGWRSSSRPGDEPSWDEEARLNDRFEAAGVSVGAGQGYCASEPGWFRITFAIPREELVAGLRRIEQVVGMEGQKWTAI

SEQ ID NO: 2400 - protein, 1155 aa, Candida albicans
MLQQYTLLLIYLSVATAKTITGVFNSFNSLTWSNAATYNYKGPGTPTWNAVLGWSLDGTSASPGDTFTLNMPCVFKFTTSQTSVDLTAHGVKYATCQFQAGEEFMTFSTLTCTVSNTLTPSIKALGTVTLPLAFNVGGTGSSVDLEDSKCFTAGTNTVTFNDGGKKISINVDFERSNVDPKGYLTDSRVIPSLNKVSTLFVAPQCANGYTSGTMGFANTYGDVQIDCSNIHVGITKGLNDWNYPVSSESFSYTKTCSSNGIFITYKNVPAGYRPFVDAYISATDVNSYTLSYANEYTCAGGYWQRAPFTLRWTGYRNSDAGSNGIVIVATTRTVTDSTTAVTTLPFDPNRDKTKTIEILKPIPTTTITTSYVGVTTSYSTKTAPIGETATVIVDIPYHTTTTVTSKWTGTITSTTTHTNPTDSIDTVIVQVPSPNPTVTTTEYWSQSFATTTTITGPPGNTDTVLIREPPNHTVTTTEYWSESYTTTSTFTAPPGGTDSVIIKEPPNPTVTTTEYWSESYTTTTTVTAPPGGTDTVIIREPPNHTVTTTEYWSQSYTTTTTVIAPPGGTDSVIIREPPNPTVTTTEYWSQSYATTTTITAPPGETDTVLIREPPNHTVTTTEYWSQSYATTTTITAPPGETDTVLIREPPNHTVTTTEYWSQSYTTTTTVIAPPGGTDSVIIKEPPNPTVTTTEYWSQSYATTTTITAPPGETDTVLIREPPNHTVTTTEYWSQSYATTTTITAPPGETDTVLIREPPNHTVTTTEYWSQSFATTTTVTAPPGGTDTVIIREPPNHTVTTTEYWSQSFATTTTIIAPPGETDTVLIREPPNPTVTTTEYWSQSYTTATTVTAPPGGTDTVIIYDTMSSSEISSFSRPHYTNHTTLWSTTWVIETKTITETSCEGDKGCSWVSVSTRIVTIPNNIETPMVTNTVDTTTTESTLQSPSGIFSESGVSVETESSTFTTAQTNPSVPTTESEVVFTTKGNNGNGPYESPSTNVKSSMDENSEFTTSTAASTSTDIENETIATTGSVEASSPIISSSADETTTVTTTAESTSVIEQQTNNNGGGNAPSATSTSSPSTTTTANSDSVITSTTSTNQSQSQSNSDTQQTTLSQQMTSSLVSLHMLTTFDGSGSVIQHSTWLCGLITLLSLFI

SEQ ID NO: 2401 - protein, 145 aa, Saccharomyces cerevisiae
MDRNVYEACSNIIKEFGTHVVSADEVLAEKIDNAVPIPFKTREEIDADVEKDRNEGVFEGNIIPDIDLRVVHYYATQLCLNKYPHLINAFDETSLITLGLLIEKWVKDYLTSIQTEQGRQSKVIGKGPCEFISKHIDYRHAPGNI

SEQ ID NO: 2402 - protein, 438 aa, Schizosaccharomyces pombe
MPPKEDWEKYQKPVDTEEENDKNPPPLDEGDIELLKSYATGPYARELAAIKEDTEAVLKRINDTVGIKESDTGLAPISFWDVAADRQRMSEEQPLQVARCTKIIENEQSAEKNAYVINLKQIAKFVVSLGERVSPTDIEEGMRVGCDRNKYAIQLPLPPKIDPSVTMMQVEEKPDVTYGDVGGCKEQIERLREVVELPLLSPERFVKLGIDPPKGIMLYGPPGTGKTLCARAVANRTDATFIRVIGSELVQKYVGEGARMVRELFEMARTKKACIIFFDEIDAIGGARFDDGAGGDNEVQRTMLELITQLDGFDPRGNIKVLFATNRPNTLDEALMRPGRIDRKVEFGLPDLEGRAHILRIHAKSMAIDKDIRWELIARLCPSQTGAELRSVCTEAGMFAIRARRRVATEKDFLDAVQKVVKGNQKFSSTADYMNMSS

SEQ ID NO: 2403 - protein, 146 aa, Coccidioides immitis
MKFSLLSAIAAAVFVPFTSATPLASTTDLSYDTHYDDPSLALSGVTCSDGDNGMITKGYNTAGEIPNYPHVGGAFTVETWNSPNCGKCYKVTYNAKTIFLTAIDHSNSGFNIAKKSMDVLTNGRAEELGRIKVTYEEVASSLCGLK

SEQ ID NO: 2404 - protein, 506 aa, Schizosaccharomyces pombe
MNQDDNGKNVVSKVSDLTSCSDFSTSSPVPCLNPLSHENNRIDLIRDLLASLSKEGVVAVYNHVRSLLFTDFTEVFPEEVSLRVFSYLDQLDLCKCKLMSKRWKRLLEDPGIWKALYMQKGWFVNENVLNEFEAWRRTHKFPQPRFENFLKQQNIIGPYGTMFLPQQFIFDSNGRPLLNWSYLYKEHAHLDSNWRHGRFLVSTFNNPSIRFPADQDFRATLDSVYCVQYDDEIMVSGSKDRTVSVWDVNSRFILYKLYGHSGSVLCLDFCRRRNLLVSGSSDSTIIIWDWQNRRPLKVYFGHTDNVLGVVVSENYIISSSRDHTARVWRLDATSPAEACMHVLRGHLASVNSVQYSSKTGLIVTASSDRTLRTWDITTGHCIRIIHAHQRGIACAQYNGKFIVSGSSDLTIRIFEASSGKLLRMLQGHEDLIRTVRFNDEKIVSGGYDGTVRIWNFNTGEQHCVLHNSRNSRVFGLQFDHRRIIACTHSSEILVWNFDDGLDCTFF

SEQ ID NO: 2405 - protein, 1151 aa, Saccharomyces cerevisiae
MDQDNNNHNDSNRLHPPDIHPNLGPQLWLNSSGDFDDNNNNNNNNNNNNSTRPQMPSRTRETATSERNASEVRDATLNNIFRFDSIQRETLLPTNNGQPLNQNFSLTFQPQQQTNALNGIDINTVNTNLMNGVNVQIDQLNRLLPNLPEEERKQIHEFKLIVGKKIQEFLVVIEKRRKKILNEIELDNLKLKELRIDNSPQAISYLHKLQRMRLRALETENMEIRNLRLKILTIIEEYKKSLYAYCHSKLRGQQVENPTDNFIIWINSIDTTESSDLKEGLQDLSRYSRQFINNVLSNPSNQNICTSVTRRSPVFALNMLPSEILHLILDKLNQKYDIVKFLTVSKLWAEIIVKILYYRPHINKKSQLDLFLRTMKLTSEETVFNYRLMIKRLNFSFVGDYMHDTELNYFVGCKNLERLTLVFCKHITSVPISAVLRGCKFLQSVDITGIRDVSDDVFDTLATYCPRVQGFYVPQARNVTFDSLRNFIVHSPMLKRIKITANNNMNDELVELLANKCPLLVEVDITLSPNVTDSSLLKLLTRLVQLREFRITHNTNITDNLFQELSKVVDDMPSLRLIDLSGCENITDKTIESIVNLAPKLRNVFLGKCSRITDASLFQLSKLGKNLQTVHFGHCFNITDNGVRALFHSCTRIQYVDFACCTNLTNRTLYELADLPKLKRIGLVKCTQMTDEGLLNMVSLRGRNDTLERVHLSYCSNLTIYPIYELLMSCPRLSHLSLTAVPSFLRPDITMYCRPAPSDFSENQRQIFCVFSGKGVHKLRHYLVNLTSPAFGPHVDVNDVLTKYIRSKNLIFNGETLEDALRRIITDLNQDSAAIIAATGLNQINGLNNDFLFQNINFERIDEVFSWYLNTFDGIRMSSEEVNSLLLQVNKTFCEDPFSDVDDDQDYVVAPGVNREINSEMCHIVRKFHELNDHIDDFEVNVASLVRVQFQFTGFLLHEMTQTYMQMIELNRQICLVQKTVQESGNIDYQKGLLIWRLLFIDKFIMVVQKYKLSTVVLRLYLKDNITLLTRQRELLIAHQRSAWNNNNDNDANRNANNIVNIVSDAGANDTSNNETNNGNDDNETENPNFWRQFGNRMQISPDQMRNLQMGLRNQNMVRNNNNNTIDESMPDTAIDSQMDEASGTPDEDML

SEQ ID NO: 2406 - protein, 150 aa, Schizosaccharomyces pombe
MQIFVKTLTGKTITLEVESSDTIDNVKSKIQDKEGIPPDQQRLIFAGKQLEDGRTLSDYNIQKESTLHLVLRLRGGGKKRKKKTYTTPKKIKHKHKKVELAVLKYYKVEDDGSVKRLRRECPNCGASTFMANHKDRLYCGRCHLTLKLEN

SEQ ID NO: 2407 - protein, 388 aa, Neosartorya fumigata
MSPSPIEEQATRLLKEVPLIDGHNDFPYMIRGWFRNDINGQDAHLYDMPIGQTDLQRLQKGLLGGQFWSAFVPCPKNPDKEVGSLEALRQTLQQLDVIHRLIERHPTILQFADSAASIWSSFRAGRVASLIGIEGLHQIADSVSALRMLHRLGVRYVTLTHNCHNAFADAATVSPELHGGLSRKGERLIRELNRMGMMIDLSHTSHEAQTQALRLSRAPVIYSHSSIYSLRAHARNVTDENLHLLHRNRGVVMICFLRELLASEADQATLAHVIDHIIYAGTRIGYEHVGIGSDFDGMLRGPDGLHDVSCYPALVAGLLERGVSEEDVKRVMGLNVIRVLEEVERVAAELQGAGEECLCDELDEVWNEDIKEQLTRERERVRKLGPQK

SEQ ID NO: 2408 - protein, 1018 aa, Candida albicans
MLPSIVISIVLASFVSAESSITEAPTTTAEDNPYTIYPSVAKTASINGFADRIYDQLPECAKPCMFQNTGVTPCPYWDTGCLCIMPTFAGAIGSCIAEKCKGQDVVSATSLGTSICSVAGVWDPYWMVPANVQSSLSAAATAVASSSEQPVETSSEPAGSSQSVESSQPAETSSSEPAETSSSEPAETSSETSSEQPASSEPAETSSEESSTITSAPSTPEDNPYTIYPSVAKTASINGFADRIYDQLPECAKPCMFQNTGVTPCPYWDTGCLCIMPTFAGAIGSCIAEKCKGQDVVSATSLGTSICSVAGVWDPYWMVPANVQSSLSAAATAVPSSSEQSVETSSESAESSQSVESSQPAETSSEQPSETSSETSSQQLSSITSAPDSSATSSSSTTSTFIRTASINGFADKLYDQLPECAKPCMFQNTGITPCPYWDAGCLCVMPQFAGAIGSCVADSCKGQDIVSVTSLGTSVCSVAGVNAPYWMLPASVKSSLSVAATAVPTSDSASETASQEPSETSSEQPSETASQQPAETSSEESSTITSAPSTPEDNPYTIYPSVAKTASINGFADRIYDQLPECAKPCMFQNTGVTPCPYWDTGCLCIMPTFAGAIGSCIAEKCKGQDVVSATSLGSSICSVAGVWDPYWMLPANVQSSLNAAATAVATSDSASEVASASESASQVPQETSAASSQSANNSVASAAPSNSSVSAAPSSNSSGVPAAPSNNSSGASVVPSQSANNSSASAAPSNNSSSAISESVAPSSYGNSTIAQPSTSTKSDAASITGPITTDKVITNESGIVFTSTVIITHVSEYCDQTSAAAVQSSACEEQSSAKSEQASASSEQVKVITSVVWCESSIQSIESVKTSAEAAHKTEVIASCASELSSLSSAKSEAMKTVSSLVEVQKSAVAKQTSLAAVQSSAASVQLSAAHAQKSSEAVEVAQTAVAEASKAGDEISTEIVNITKTVSSGKETGVSQATVAANTHSVAIANMANTKFASTMSLLVASFVFVGLFI

SEQ ID NO: 2409 - protein, 3268 aa, Saccharomyces cerevisiae
MVLFTRCEKARKEKLAAGYKPLVDYLIDCDTPTFLERIEAIQEWDRSRDDLYVWIPILDRMDGLLLKVAEKYKYKQDPKKECEVKLVEMEAHDVDYCLKMLKFTRRLLLNTENRFVYSSGDVLMYLLNCPNFTIKLAVMRILAILGERFVIAREKIVAHNIFGDHNLRKKTLKLALSLSSSVMDEDGEHFSLVDLYFDKKKVPQKWRKLRFTHYTSNDFKKSSQQKNNINETQTSIKKVTMTTQELCEHSLQQIFDKGMALLPAESWFDFSIKASVAKAFSDDSGENIDLRNIIIETKLNAIAFVNTIFSPPQVSSKLFELDPYAFNSLTDLISLSETKIPKELRTDALFTLECISLKHVWCSDIIRNLGGNISHGLLFQILRYIAKTLREATDEIDEEYNVRFFYLISNLADVKPLHESLFAAGLIPTLLEIVSIRNCPYKRTLASATHLLETFIDNSETTTEFIENDGFTMLITSVANEIDFTLAHPETWQPPKYSVVYYSISFRELAYIRSLLKLVLKLLSTDSGDRIRNLIDSPILVSLKKILENKLVFGLTLITYTLDVVQKVINSEPTIYPVLVEAGLIPYVIDNFPKLIGPSAELLSLLPDVVSAICLNPEGLKQVKEKGLINNLFDFLLDADHARILTGGDRSTEYGTDIDELARHYPDLKANIVEALCNVIRKMPSTFRNEREFLFTSPKDQKYFFHRKNEEILTDKEEHEPAYWELLDKGTMLDTFTSVLFGMSLGNGSFSQVPQHLEARDFLAIIFMENPPYEYFTSVAISNVTEVLQYLDEKYEDYAFMDVMKVLNDQLENLNDFLNSPNDRSFFLERDGENSVRSCHSKLCRLAAILNIVTNVYIDLTTLSCKRIMQIYSYFDKRGFSLIKNLKLLFQKCALEEMYIRQHMPDSVITETMPLPIVDVSGDGPPLQIYIDDPKKGDQKGKITSVKTRNTLQMRTILYTLQSNTAILFRCFLRLSHSRNMDLEHKDLTTEVHIFENVVENVIEMLKATELEGHLPYILVLLNFNTFVFTIPKASPNSTEILQTIPAYIFYQKGGYLLYLHIIRDLFTRMTKIKDLSSLDNINYIDESNGILTLSCLINALTFYNKSMQTETMENVQSIGKYYVSIDDDYNIMKALTVPIKVMALAMILDLDKSDSLFKTQSRNVPYSVFKQLLSMLKNIFTNVNIYTKELYELHWDLIFPPIKKISLFEQVGIPGDVAANYLTDTGDDLPADNSIGLFSPEQWEKYKKLIGEDKSIYYPQPMQAQYYKGCSSKELDELRDTFFNDGLPSRIFTVLPFYPKLVNAFAKTLLQIFTKYDEPTEVFAGRILDRILETDLDDPATLSSLIHLFGIFLNEKYIYQKASHLMQRFIEYLEKSLKPEHVNTPWFSKALYVYEIILAKSELPHLEELSKDVLLRYPLLSMAKVFRIPDPMKQKLFDILIRVSDISNFYSALATSRILIFYSRDELYANNIARSGILSRLLKVIGSFQKLDKINFLESSFLLLTRRCFETTENVDALIRAEINRSFTARPLGGGDDAVRELTTILEEKAHVVMRSPSQFIDVLCETARFHEFDDQGALVDYSLKRFLGEKDKNTQASSTEKSDIYERTGIMHLLLSQLMAASEKDWLSEPANSSDLPENKKAQLDPSRNPVCAYMIFLLKLLVELVSSYNQCKFEFLTFSRRNTYAERPRPRTTAINFFLYRLLDKPVGTDHDKHEAKRREVIGMLARSVIIGFLATVQDDRTTKTDVKLADPHMNFIRKFAIEAIIKAIRNATSSSKLLESNHLKLDMWFRIITSMVYVQAPYLRQLLDSNKVEADQYQLCKLVIDLGLPSVITEAMASIDLNYPFSKKIFNVAVEALNTISSTRNNFSEHFKIEDHDEVEDEVDESDKEEIPDMFKNSALGMYDVEDIEEDDDDDTSLIGDDDAMAFVDSDNGFEVVFSDEDDDMGEEDADDARSDSEENELSSEMQSSTADGTDVDYEVDDADGLIINIDQPSGDDEEMADYDANISHSSHSENEDDASMDVIEVYDDELSSGYDVDLSDYDVDESDWDSGLSSLSISDEDSESSEDEPINSTRMGDSRRRWLIAEGVELTDDSQGESEEDDRGVFRGIEHIFSNENEPLFRVHDEMRHRNHHRSINRTHFHSAMSAPSLSLLNRGRRNQSNLINPLGPTGLEQVENDISDQVTVAGSGSRPRSHHLHFSEVLVSGSFFDEPVLDGIILKSTVSRWKDIFDMFYDSKTYANCIIPTVINRLYKVSLALQKDLENKREQEKLKNKNLLFNEAKVESHNSSDAISVEQDDIQESNVTHDDHEPVYVTIQGSEVDIGGTDIDPEFMNALPDDIRADVFAQHVRERRAEARLNSDHNVHSREIDSDFLEAIPEDIREGILDTEAEEQRMFGRIGSSADVIRADDDVSNNDEEVENGLDHGNSNDRNNADPEKKKPARIYFAPLIDRAGIASLMKSVFISKPYIQREIYHELFYRLCSSKQNRNDLMNTFLFILSEGIIDQHSLEKVYNIISSRAMGHAKTTTVRQLPSDCTPLTVANQTIEILQSLIDADSRLKYFLIAEHDNLIVNKANNKSRKEALPDKKLRWPLWHLFSLLDRKLITDESVLMDLLTRILQVCTKTLAVLSTSSNGKENLSKKFHLPSFDEDDLMKILSIIMLDSCTTRVFQQTLNIIYNLSKLQGCMSIFTKHLVSLAISIMSKLKSALDGLSREVGTITTGMEINSELLQKFTLPSSDQAKLLKILTTVDFLYTHKRKEEERNVKDLQSLYDKMNGGPVWSSLSECLSQFEKSQAINTSATILLPLIESLMVVCRRSDLSQNRNTAVKYEDAKLLDFSKTRVENLFFPFTDAHKKLLNQMIRSNPKLMSGPFALLVKNPKVLDFDNKRYFFNAKLKSDNQERPKLPITVRREQVFLDSYRALFFKTNDEIKNSKLEITFKGESGVDAGGVTREWYQVLSRQMFNPDYALFLPVPSDKTTFHPNRTSGINPEHLSFFKFIGMIIGKAIRDQCFLDCHFSREVYKNILGRPVSLKDMESLDPDYYKSLVWILENDITDIIEETFSVETDDYGEHKVINLIEGGKDIIVTEANKQDYVKKVVEYKLQTSVKEQMDNFLVGFYALISKDLITIFDEQELELLISGLPDIDVDDWKNNTTYVNYTATCKEVSYFWRAVRSFDAEERAKLLQFVTGTSKVPLNGFKELSGVNGVCKFSIHRDFGSSERLPSSHTCFNQLNLPPYESYETLRGSLLLAINEGHEGFGLA

SEQ ID NO: 2410 - protein, 403 aa, Schizosaccharomyces pombe
MTEVLKTNVLQSNENIVQYYTQKIQDAELAILQKTQNLRRLEAQRNGLNARVRLLREEIQLLQEPGSYVGEVIKTMGKNKVLVKVHPEGKYVVDISPDIDIKEIKPNIRVALRNDSYQLIKILPNKVDPLVSLMMVEKIPDSTYEMVGGLEKQIKEIKEVIELPVKHPELFESLGIPQPKGILLYGPPGTGKTLLARAVAHHTDCKFIRVSGSELVQKYIGEGSRMVRELFVMAREHAPSIIFMDEIDSIGSSRSDSSGGSGDSEVQRTMLELLNQLDGFEATKNIKVIMATNRIDILDPALLRPGRIDRKIEFPPPSAEARAEILRIHSRSMNLTRGIDLKSIAEKMNGASGAELKGVCTEAGMFALRERRVHVTQEDFELAVAKVLNKGDSGEMSLQKLFK

SEQ ID NO: 2411 - protein, 1119 aa, Candida albicans
MLQQYTLLLIYLSVATAKTITGVFNSFNSLTWSNAATYNYKGPGTPTWNAVLGWSLDGTSASPGDTFTLNMPCVFKFTTSQTSVDLTAHGVKYATCQFQAGEEFMTFSTLTCTVSNTLTPSIKALGTVTLPLAFNVGGTGSSVDLEDSKCFTAGTNTVTFNDGGKKISINVDFERSNVDPKGYLTDSRVIPSLNKVSTLFVAPQCANGYTSGTMGFANTYGDVQIDCSNIHVGITKGLNDWNYPVSSESFSYTKTCSSNGIFITYKNVPAGYRPFVDAYISATDVNSYTLSYANEYTCAGGYWQRAPFTLRWTGYRNSDAGSNGIVIVATTRTVTDSTTAVTTLPFDPNRDKTKTIEILKPIPTTTITTSYVGVTTSYSTKTAPIGETATVIVDIPYHTTTTVTSKWTGTITSTTTHTNPTDSIDTVIVQVPSPNPTVTTTEYWSQSFATTTTITGPPGNTDTVLIREPPNHTVTTTEYWSESYTTTSTFTAPPGGTDSVIIKEPPNPTVTTTEYWSESYTTTSTFTAPPGGTDSVIIKEPPNHTVTTTEYWSQSYTTTTTVTAPPGGTDTVLVREPPNHTVTTTEYWSQSYTTTTTVIAPPGGTDSVIIREPPNPTVTTTEYWSQSYATTTTITAPPGETDTVLIREPPNHTVTTTEYWSQSYATTTTITAPPGETDTVLIREPPNHTVTTTEYWSQSFATTTTVTAPPGGTDTVIIREPPNHTVTTTEYWSQSYATTTTITAPPGETDTVLIREPPNHTVTTTEYWSQSYATTTTIIAPPGETDTVLIREPPNPTVTTTEYWSQSYTTATTVTAPPGGTDTVIIYDTMSSSEISSFSRPHYTNHTTLWSTTWVIETKTITETSCEGDKGCSWVSVSTRIVTIPNNIETPMVTNTVDSTTTESTSQSPSGIFSESGVSVETESSTVTTAQTNPSVPTTESEVVFTTKGNNENGPYESPSTNVKSSMDENSEFTTSTAASTSTDIENETIATTGSVEASSPIISSSADETTTVTTTAESTSVIEQPTNNNGGGKAPSATSSPSTTTTANNDSVITGTTSTNQSQSQSQYNSDTQQTTLSQQMTSSLVSLHMLTTFDGSGSVIQHSTWLCGLITLLSLFI

SEQ ID NO: 2412 - protein, 775 aa, Schizosaccharomyces pombe
MNEKKKDSLSVLDSNEFFGETTMVSPSIDVSSSPRPNVERFSPCSTKKDLLEGNNIMTRIPEELSRVSLQFDSKGSQQSMIFTNNRCLSDKENLENLQNLLYLHCDLNRPHLSCELPSEHREKCLKRRNSSLSSNLHANKRFLFNSQSDGNKKNETFPSTNYSNVFYPNNCDSKEVASETTFSLDAPNNSVNYSYFSPNLLGNDSKTRQSFPPHSSSSSHNSLHEPVIYDFSSENPSIHPSNHLSSQKNAVLKLAQLISSFEKLPESVRQYLLFHLLSRCGKHAVQNIHKILLPIFQKNFLTGFPAEITNLVLTHLDAPSLCAVSQVSHHWYKLVSSNEELWKSLFLKDGFFWDSIDSKIRTMCLEQSLSACAIMKRVYFRHFNLRERWLHAPEKIKRCSFPIHGVRLITKLQFDDDKIIVSTCSPRINIYDTKTGVLIRSLEEHEGDVWTFEYVGDTLVTGSTDRTVRVWDLRTGECKQVFYGHTSTIRCIKIVQGNQSTTDTDDVEKENRPASNDANSMPPYIISSSRDCTIRLWSLPCLDDPPFVNVNENPDQNNDFTSATTNPFYIRTLRGHTDSVREVACLGDLIVSASYDGTLRVWKASTGVCLHVLRGHVGRVYSVTINPSRQQCISAGTDAKIRIWNLESGELLQTLHGHSNLVSQVTFNQNILVSASAPPDTSLRVWDLNTGSCRDILKCPLGHIFFQHDESKVVSGSHSTLQLWDIRSGKLVRDLLTDLDIIWQVAYNENVCVAAVLRNNRFWIEVLEFGSTKSS

SEQ ID NO: 2413 - protein, 240 aa, Neosartorya fumigata
MSERPSDLVVNRLVLFVVKGTATSTHNTVKPLILLEELGVPHDIYVVEKVSAPWFSEINPHKMVPAILDRSPDGRDTLRAWESTSTLMYIADAYDKDGTLGGRNVQERSEINNWLTLHTAALGPTAKYWLYFYKLHPEKLPKTIEKLRSNITVQYDILERRLNEPGQQYLALKDRPTIADIATLPFAMKSTAELFGLEFEKWPKLQEWSVRMGEREAVKRAWQRVAGFGHGEKEYGMLEA

SEQ ID NO: 2414 - protein, 809 aa, Saccharomyces cerevisiae
MPSSISVKLVAAESLYKRDVFRSPDPFAVLTIDGYQTKSTSAAKKTLNPYWNETFKFDDINENSILTIQVFDQKKFKKKDQGFLGVVNVRVGDVLGHLDEDTATSSGRPREETITRDLKKSNDGMAVSGRLIVVLSKLPSSSPHSQAPSGHTASSSTNTSSTTRTNGHSTSSTRNHSTSHPSRGTAQAVESTLQSGTTAATNTATTSHRSTNSTSSATRQYSSFEDQYGRLPPGWERRTDNFGRTYYVDHNTRTTTWKRPTLDQTEAERGNQLNANTELERRQHRGRTLPGGSSDNSSVTVQVGGGSNIPPVNGAAAAAFAATGGTTSGLGELPSGWEQRFTPEGRAYFVDHNTRTTTWVDPRRQQYIRTYGPTNTTIQQQPVSQLGPLPSGWEMRLTNTARVYFVDHNTKTTTWDDPRLPSSLDQNVPQYKRDFRRKVIYFRSQPALRILPGQCHIKVRRKNIFEDAYQEIMRQTPEDLKKRLMIKFDGEEGLDYGGVSREFFFLLSHEMFNPFYCLFEYSAYDNYTIQINPNSGINPEHLNYFKFIGRVVGLGVFHRRFLDAFFVGALYKMMLRKKVVLQDMEGVDAEVYNSLNWMLENSIDGVLDLTFSADDERFGEVVTVDLKPDGRNIEVTDGNKKEYVELYTQWRIVDRVQEQFKAFMDGFNELIPEDLVTVFDERELELLIGGIAEIDIEDWKKHTDYRGYQESDEVIQWFWKCVSEWDNEQRARLLQFTTGTSRIPVNGFKDLQGSDGPRRFTIEKAGEVQQLPKSHTCFNRVDLPQYVDYDSMKQKLTLAVEETIGFGQE

SEQ ID NO: 2415 - protein, 504 aa, Neosartorya fumigata
MDQVYLPQSVRTAVAVSFGVGLLYWVYRLLLQKTKSLKALDLPVLQSVGDQDIVKTLEEGHAKYPDTPFALGVPGQQLVVLPVSEIDTVKALPENQLSIKKHHYNQFLGEYSYMGTKADEFDDAMRYLLVRNTPAVLASFTAEIDYAMSTVLQVPPNSWTRVKPRSIMPKVATILSGRAFVGLPLSREPDWIESNVNYTQDVSRAWMVLRFYPHWIRPLVAPFLREVKTLEQNKALIGRKIAKLLADQEAQKLSPAQEKIPGGDMIDWFKSRYQAQGKTATAQQLTRDQLLATFASIYNLSNALTYVMFDLAANPAAVDELREELDQVLGPNVGAESIDKTALPRLIKLDSFVRESQRLSPTSLVNIPRIVTDPNGLRLKTGHVIPPGYLVMVRAQPINQSPTLYPNPERFDAFRFARLRQQGGANENRWQHTSTGADNINFGHGIWACPGRFFASAEIKVVVAYVIRHYDLRLIEGRPHPKPKYGGLAIFPDAGAEVELKPRV

SEQ ID NO: 2416 - protein, 147 aa, Candida albicans
MKFSTILAIPFAIAFANAAAAPAVTAAPAPAADNPYTIYPPVPKTASINGFADRIYDQIPKCAQECVKQSTSSTPCPYWDTGCLCVIPNFTGAVGNCVASKCRGADVTNFRKLAVGACAAAGVWDPYWIIPASVSSALDAAATATGN

SEQ ID NO: 2417 - protein, 1274 aa, Schizosaccharomyces pombe
MKFRLNANFNFSFRRYCFVQCRNKYHSHVRYLSSAKKSGILRNSYNQRTERYFTNIMIPSDYSNKFYPVDGVVPKHETQAYEFLKKFPEYDGRGVTVGILDTGVDPGAPGLSVTTTGLPKFKNIVDCTGAGDVDTSVEVAAADSNDYLTITGRSGRTLKLSKEWKNPSKKWKVGCKLAYEFFPKDLRKRLQKLETEDMNKSNRKLLQDATDEYAKFKDKFPEAPLDKDNLQTQKELEARIECLKQLAEKFDNPGPLYDVVVFHDGEHWRVVIDSDQTGDIYLHKPLADFNVAQEWSTFGSLDLLSYGVHVYDNGNITSIVAVSGTHGTHVAGIIGANHPETPELNGAAPGCQLVSLMIGDGRLDSLETSHAFSRACSEIIKNEVDIINISFGEDAGIPNKGRVIELLRDELAGKRNVVIVSSAGNNGPAYTTVGAPGGTTFDVISVGAYVTSGMMQAQYNLLSTVHDTPYTWCSRGPTLDGDTGVSIYAPGGAITSVPPYSLQNSQLMNGTSMSSPSACGGISLILSALKAQKKPYTAAAIKKAVMYTSKDLRDDFNTGMLQVDNAYEYLAQSDFQYTGARSFTINGNIGNSKRGVYLRNPTEVCSPSRHMFNVAPKFEDGEEYEKSHFEVQLSLATTQPWIQAPEYVMMAGTGRGIPVRVDPTALAPGHHFGKVLAYDASNESRRCVFEIPVTVMKPSSISNTCFSLRDVSFEPTLIKRHFLVPPKGATYVEIRVKATSELESTNMLWISVNQTIPQTKLNEASTELIMPVTQNEVTTKLVSIDDSYTLELCMAQWWSSLEPMVLDIDVNFHGIKVVNGKEINLISSQGLKRVDCASIRRENFKPDITLKDYVDSFKPTNTVIKPLGDRDIMPDGQQLFELMATYSVEISEKTELKADFAVPHNMYDNGFNGLFFMVFDSQKQRVHYGDMYTSSHTLEKGEYLYKFQLLSVDPSTLERFRNVTLRLTKKLKKPITLPLYADHIDFCDNKTYERENIDAGVVESFVVGTNIEGEQYASELKENSLLTGELKFGDCEKGTVPVTLVLPPKISTKEDTKLGEKCANIVQLQVDLLSKLADQEKEKHLKYLQSSYKNSLEVQLAKLDIVKETNERLSTADSILSLIDTEALSRYYSCQQKVEDTIPRDVVLEKKMALQRDAFIRALVVKCETFSTQGHKDKDNYFQNYQLLLNWLENSDPRVWQIKKDYYKSQNQYGLALKALLELLKENGNSGKMDVAKLLSEEKELLVNLGWNYWHDIVFVETVKRVPPYSYALF

SEQ ID NO: 2418 - protein, 272 aa, Schizosaccharomyces pombe
MFRNQYDGDATTWSPQGRLHQVEYALEAIKQGSATVGLVSKTHAVLVALKRNAEELSSYQKKLIRIDDHIGIAIAGLAPDARVLSNYMKQEALSSKTLFTRPIPVRRLMSKVAEKAQINTQEYGRRPYGVGFLVIGYDESGPHLLEFQPSGLVLEYLGTSMGSRSQSARTYIERNLDTFPDSSREELILSALRALRDTLSKDQELTEENVSISVIGKDEKYTLYDQNDTKEWLDKLGDKGPAAARASRAAAEEPQAPTAEAILDSADAMETD

SEQ ID NO: 2419 - protein, 152 aa, Neosartorya fumigata
MKFTTPISLISLFVSSALAAPTPENEARDAIPVSVSYDPRYDNAGTSMNDVSCSNGVNGLVTKWPTFGSVPGFARIGGAPTIPGWNSPNCGKCYKLQYEQNTIYVTAIDAAPGGFNIATSAMDQLTNGMAVELGRVQATYEEADPSHCASGV

SEQ ID NO: 2420 - protein, 358 aa, Candida albicans
MKFSQVATTAAIFAGLTTAEIAYVTQTRGVTVGETATVATTVTVGATVTGGDQGQDQVQQSAAPEAGDIQQSAVPEADDIQQSAVPEAEPTADADGGNGIAITEVFTTTIMGQEIVYSGVYYSYGEEHTYGDVQVQTLTIGGGGFPSDDQYPTTEVSAEASPSAVTTSSAVATPDAKVPDSTKDASQPAATTASGSSSGSNDFSGVKDTQFAQQILDAHNKKRARHGVPDLTWDATVYEYAQKFADQYSCSGNLQHSGGKYGENLAVGYADGAAALQAWYEEAGKDGLSYSYGSSSVYNHFTQVVWKSTTKLGCAYKDCRAQNWGLYVVCSYDPAGNVMGTDPKTGKSYMAENVLRPQ

SEQ ID NO: 2421 - protein, 273 aa, Neosartorya fumigata
MGKAALQDPHGGIWYFAYGSNLRLSVLENRGIKALDIKAVIVPSHYLTFDIFGIPYAEPSFASVAPFAREKKTTLRLGDSPASRDVPPVQGLAYLLNPRDYRQLVISEGGGVAYDEVEVHASILDKDGKPDPGATLIARTLQAKYPWRPNGAPSARYLGLISTGCKQNEPLTAYSDYIDSLPAYEPPTSLHAKVGGLLFLMFWRPPLRLLIRLIRVNTDQDGHCPQWLGWIILTLYGLMWSYHDNIHSKIWGRGDGRKLHFEETPAKEVPVRH

SEQ ID NO: 2422 - protein, 128 aa, Schizosaccharomyces pombe
MQIFVKTLTGKTITLEVESSDTIDNVKSKIQDKEGIPPDQQRLIFAGKQLEDGRTLSDYNIQKESTLHLVLRLRGGIIEPSLKALASKYNCEKQICRKCYARLPPRATNCRKKKCGHTNQLRPKKKLK

SEQ ID NO: 2423 - protein, 504 aa, Schizosaccharomyces pombe
MSDLLDDEFYEEEFENDLLDASEFEDEFDEDAEIDDDGFTVERKRRRAHSVSYRVVSVRDLRASLNEKINQLTSIIDLTREQVLGLYRYFKWNRERLLERYIDAPEESLQKAGVGLSGSKQREVVHHEGTCEICYDEGCLPFFSAECDHEFCLACYRQYLDSRISEGESVIQCPEESCTQIVSIQSITKVLDEKSLDRYHRLLDRSFVDDNDHLRWCPAPDCEFAIECHVTQASLSSVVPTVTCNCGKQFCFGCGHDNHQPTICPLVKIWLQKCQDDSETANWIHANTKECPKCSTTIEKNGGCNHMTCKKCKYEFCWVCLGPWTEHGNNWYTCNRYEEKSSTSARDSQSKSRASLERYLHYYNRFANHEQSAKLDHELYEHTHKRMTQMQVDSNLSWVEVQFLKNAVDILFQCRQTLKWTYAFAYYLARNNQTEIFEDNQRDLELAVENLSELCERPCQDCSLSVFKQRVLDKTVYVRSRRDVLLDDTARGLAEGRWEYVVDV

SEQ ID NO: 2424 - protein, 378 aa, Candida albicans
MLFKSFVTFTVLANALAAPLAHQHHQHKEEKRAVHVVTTTNVVVVTIGNGDQTTTFAAPSVAAESSVSVSVNTEPPQNHPTTTQDVASASTYPSSTDGSAASSSAAASSSSQAGSEPSGGVGSGGAKGITYSPYSDNGGCKSESQIASEIAQLSGFDVIRLYGVDCSQVEAVLKAKTSSQKIFAGIFDVSSITSGIESLAEAVKSCGSWDDIYTVSIGNELVNAGSATPSQIKAYVEEGRKALKAAGYTGPVVSVDTFIAVINNPDLCDYSDYMAVNAHAFFDGHVVAENSGAWVLQQIQRVWTACGGKKNVLITETGWPSRGDSNGVAVPSKSNQQAAISSIKSSCGASAILFTAFNDLWKADGPYNAEKYWGIYSN

SEQ ID NO: 2425 - protein, 189 aa, Saccharomyces cerevisiae
MANLRTQKRLAASVVGVGKRKVWLDPNETSEIAQANSRNAIRKLVKNGTIVKKAVTVHSKSRTRAHAQSKREGRHSGYGKRKGTREARLPSQVVWIRRLRVLRRLLAKYRDAGKIDKHLYHVLYKESKGNAFKHKRALVEHIIQAKADAQREKALNEEAEARRLKNRAARDRRAQRVAEKRDALLKEDA

SEQ ID NO: 2426 - protein, 253 aa, Schizosaccharomyces pombe
MSSIGTGYDLGLFFSPDGRLFQAEYAYKAVENASTCIGIKCEDGVILALEKVVTSKLLKPRVNNRIGSVDRHIGIATTGFIPDGQHIVKRARDEATSWRDNYGSPIPGTVIADRLGNYVQLFTCYSSVRPFGVMSFVATYDSEGPHLYMVEPNGVYWGYNGAAAGKGRQVARNELEKLNFSSLKMKDAVKEAARILYATHDEENNKEHEIEMTWVGVETNGIHTPVPDELLQEAEAYARRIADGEEEDIAMQE

SEQ ID NO: 2427 - protein, 882 aa, Schizosaccharomyces pombe
MQVTIPKSTSKEDDKNRNLLPKNVKPIHYDLSLYPDLETFTYGGKVVVTLDVLEDSNSITLHGINLRILTAALEWGSQTVWASEVSYGDERIVLQFPSTVPANSVAVLTLPFTARISSGMEGFYRSSYVDSDGNTKYLATTQMEPTSARRAFPCWDEPALKATFTIDITAKENYTILSNMNAVEETVKDGLKTARFAETCRMSTYLLAWIVAELEYVEYFTPGKHCPRLPVRVYTTPGFSEQGKFAAELGAKTLDFFSGVFGEPYPLPKCDMVAIPDFEAGAMENWGLVTYRLAAILVSEDSAATVIERVAEVVQHELAHQWFGNLVTMQFWDGLWLNEGFATWMSWFSCNHFYPEWKVWESYVTDNLQSALSLDALRSSHPIEVPIMHDYEINQIFDAISYSKGSCVIRMVSKYVGEDTFIKGIQKYISKHRYGNTVTEDLWAALSAESGQDISSTMHNWTKKTGYPVLSVSETNDGELLIEQHRFLSTGDVKPEEDTVIYWAPLKLKTMKDGKAVVDEKAVLSDRSKKIKVDKEALESYKLNSEQSGIYRVNYSADHLKKLSQIAVEKPDYLSVEDRAGLIADVASLSRAGYGKVSSTLDLIKTWKDEPNFVVFAEMLARLNGIKSTLRFESSDIIAAMKKLVLEVSATKAHSLGWEFKANDDHIIRQFKSTVYNYAGLFGDDKVVKDALSKFDAYASGNKSAINDNLRSAVFNIAIRYGGAKSWDQLLEIYTKTNDPYVRNSCLRAFGVTEDEKYIQKTLDLTLDPIVKEQDIYLILVTLSTHKNGVLAMWKFATSNWDKLLSRLPVAGTMRGYVVRFVTSGFTHASAIDKIKEFFADKDTKLYERALQQSLDTISANSSFIDKSLDDITRWLKENRYM

SEQ ID NO: 2428 - protein, 371 aa, Encephalitozoon intestinalis
MKGISKVLSASIVLMKLKGVYSTTVLCGDSTQGLQGTTQPSYVLVPSAPETIANCGYSPQNMYVPSTPTTMPSTVPGTTGESETPTSPTSSPTEDVGTCKIAVVKHCDAPGTSSTPCEPEQTLAPSQPVAATIATPLVVASVQTPQAAVTILTPKAVSAQPATIISPFNQAPGYYNSAIPGQILTGNVLSPSASSCQVVPGTTGSSTPQQLPGAVSSGTIPCQIVQGTQSSGNTPGQQFLPGIVPVGSLQPDQATSGTPTPSVSQSQSGQQCCCTPPITNPVMPTPMGISSNGYPSSTAYAPTLGQLGPCIDTQKSTSSCEPKEKPVAQYGMEACAAPTPTAVLGNAEYLLSPGMYNSLNSPCNACCQQQC

SEQ ID NO: 2429 - protein, 123 aa, Saccharomyces cerevisiae
MKLPVAQYSAPDGVEKSFAPIRDDPRYMTTEGRTTGPSDHVLNAGQIDRDKPSEPERTKDGSQLTYLGQLRTQLTGLQDDINEFLTGRMELAKNKKKAGADEKRIQEEINQLLDGGDGDEDAV

SEQ ID NO: 2430 - protein, 128 aa, Saccharomyces cerevisiae [sequence omitted]

SEQ ID NO: 2431 - protein, 381 aa, Saccharomyces cerevisiae
MSQFFEAATPVAIPTNNTNGGSSDAGSAATGGAPVVGTTAQPTINHRLLLSLKEAAKIIGTKGSTISRIRAANAVKIGISEKVPGCSDRILSCAGNVINVANAIGDIVDVLNKRNPENEDAAEGEAEEHYYFHFLNHILPAPSKDEIRDLQQLEDIGYVRLIVANSHISSIIGKAGATIKSLINKHGVKIVASKDFLPASDERIIEIQGFPGSITNVLIEISEIILSDVDVRFSTERSYFPHLKKSSGEPTSPSTSSNTRIELKIPELYVGAIIGRGMNRIKNLKTFTKTNIVVERKDDDDKDENFRKFIITSKFPKNVKLAESMLLKNLNTEIEKRENYKRKLEAAEGDATVVTERSDSASFLEEKEEPQENHDNKEEQS

SEQ ID NO: 2432 - protein, 590 aa, Ajellomyces capsulatus
MQRALSSTSRASVLSSAPTRAPVSRFRSAGLSLQQQRFAHKELKFGVEGRAALLKGIDTLAKAVCTTLGPKGRNVLIESSYGSPKITKDGVTVAKAVTLQDKFENLGARLLQDVASKTNEVAGDGTTTATVLARAIFSETVKNVAAGCNPMDLRRGIQAAVEAVVEYLQANKRDITTTEEIAQVATISANGDTHVGKLISNAMEKVGKEGVITVKDGKTIEDELEVTEGMRFDRGYVSPYFITDTKAQKVEFEKPLIVLSEKKISAVQDIIPALEASTTLRRPLVIIAEDIEGEALAVCILNKLRGQLQVAAVKVPGFGDNRKSILGDIGILTNATVFTDELDMKLEKATADMLGSTGSITITKEDTIILNGDGSKDSIAQRCEQIRGVIADPTTSDYEKEKLQERLAKLSGGVAVIKVGGASEVEVGEKKDRVVDALNATRAAVEEGILPGGGTALLKAAANGLASVKPTSSDQLRRISSLVSAITRPARTIVENAGLEGSVIVGKLTDEHASDFNRGFDSAKGEYVDMIASGIVDPLKVVRTALVDASGVASLLGTTEVAIVEAPEEKGPAGPPGGMGGMGGMGGGMF

SEQ ID NO: 2433 - protein, 324 aa, Schizosaccharomyces pombe
MPPAVSSETSTIVPQQVIVHPLVLLSAVDSYNRSAKGTKRRVVGILLGQNNGDVVNVANSYAIPFEEDEKNASVWFLDHNFMESMNEMFKKINANEKLVGWYHTGPQLRPSDLEINNLLKKYIPNPVLVIIDVKPKSVGLPTNAYFAIDEIEDDGSKSSRTFVHLPSSIEAEEAEEIGVEHLLRDTRDASVGTLATRVTQQAQSLQGLGQRLTEIADYLRKVVDGQLPINHAILAELQSVFNLLPNIFSGPVVSEQALESEAQRAFNVNSNDQLMSIYISSIVRAVIALHDLLDSLAASKAMEQQDIKPTVQNGEVSANAEQKA

SEQ ID NO: 2434 - protein, 259 aa, Schizosaccharomyces pombe
MSGYDRALSVFSPDGRLLQVEYGQEAVRRGTTAIALRGNECIVIGVERKNVPKLQNVSNFQKIAMVDNHVCLAFAGLNADARILIDKARVEAQNHKLNLADPVSIEYLTRYVAGVQQKYTQSGGVRPFGVSTLIAGFDVGDNTPRVYQTEPAGIYNAWKATAIGRASKAAREYLEKNWKEGLSRDETIHLAVSSLLEVVQTASGNIELAIMDPGKDVEFLHSDKIDTIVKEIQDEKEAEAARKKSGRSAPGVSTTSTIQ

SEQ ID NO: 2435 - protein, 277 aa, Emericella nidulans
MQLLALTLALCASIAALPTQQTPLPLEDPIKSPFPIHHSCNATEQRQLATALQETVTLAEHAKDHILRWGNESAIYRKYFGDRPSLTAIGAYDIIVNGNPDNILFRCDNPDGNCALEGWGGHWRGENASDETVICELSYTTRRSLSTMCSQGYTISEWETNTFWAGDLLHRLYHMPAIGQGLVEHYADGYEGVLELAEGNRTEAVHDSETLQYFALEVYAYDVAVPGIGCVGGEEENDGQGEEQTEEPAQDDQQDEAAEEEIPENCHTHEGGELHCT

SEQ ID NO: 2436 - protein, 934 aa, Schizosaccharomyces pombe
MSNSDIRSFFGGGNAQKKPKVSPTPTSPKPKRSLKKKRIVLSDDEDGTIENSKVPASKSKVQKRNESEDISHSLPSIVHEDDKLVGSDGVSTTPDEYFEQQSTRSRSKPRIISNKETTTSKDVVHPVKTENFANDLDTTSDSKPVVHQTRATRKPAQPKAEKSTTSKSKSHTTTATTHTSRSSKSKGLPRFSDEVSQALKNVPLIDVDSMGVMAPGTFYERAATTQTPGSKPVPEGNSDCLSGISFVITGILETLTRQEATDLIKQYGGKVTGAPSVRTDFILLGENAGPRKVETIKQHKIPAINEDGLFYLITHLPASGGTGAAAQAAQQKKEQEEKKILETVARMDDSNKKESQPSQIWTSKYAPTSLKDICGNKGVVQKLQKWLQDYHKNRKSNFNKPGPDGLGLYKAVLLSGPPGIGKTTAAHLVAKLEGYDVLELNASDTRSKRLLDEQLFGVTDSQSLAGYFGTKANPVDMAKSRLVLIMDEIDGMSSGDRGGVGQLNMIIKKSMIPIICICNDRAHPKLRPLDRTTFDLRFRRPDANSMRSRIMSIAYREGLKLSPQAVDQLVQGTQSDMRQIINLLSTYKLSCSEMTPQNSQAVIKNSEKHIVMKPWDICSRYLHGGMFHPSSKSTINDKLELYFNDHEFSYLMVQENYLNTTPDRIRQEPPKMSHLKHLELISSAANSFSDSDLVDSMIHGPQQHWSLMPTHALMSCVRPASFVAGSGSRQIRFTNWLGNNSKTNKLYRMLREIQVHMRLKVSANKLDLRQHYIPILYESLPVKLSTGHSDVVPEIIELMDEYYLNREDFDSITELVLPADAGEKLMKTIPTAAKSAFTRKYNSSSHPIAFFGSSDVLPMKGSAQREVPDVEDAIEAEDEMLEEASDSEAANEEDIDLSKDKFISVPKKPKKRTKAKAEASSSSSTSRRSRKKTA

SEQ ID NO: 2437 - protein, 431 aa, Neosartorya fumigata
MAPGLLENNTLSGTAAPRTEFKAIVNDLRELQAHVQRVQSAIEAPEVQSWLNEQLHHPDQLPDKELEQLALDLVDSMDKLQLQLVPSVSLLTDGFFGYLNSKTLWTVVEAQVADRLAENGPQPVSTLGLRCGIQPERLAQLLDTLVSNGIFAYNPADDTYSNNRASLLLCHDHWTQWHLWADLYPNEFFDVSRAMPQAVRLGESRTAAQIAYGTDLDLFEYLAKEQKLAKFQKTLGAGAVAQARGLTVDYPWEEIGSEPILDIGGGSGAFLASLLRAHPHLRGSLMDIQSVIELITPEFREPHGRFSDIGSRVQQLVVGDFTKQIPPSAVYTMKWCLHDWVDDDVLTILKNVRRSIVPSSVSRFLVVESIKSPGRSGRLPRYGDLIMMITCNGKERSLEDWKRLGELAGWKLYQVHRVRRAWPCIIDFRPM

SEQ ID NO: 2438 - protein, 993 aa, Saccharomyces cerevisiae
MVDESDKKQQTIDEQSQISPEKQTPNKKDKKKEEEEQLSEEDAKLKTDLELLVERLKEDDSSLYEASLNALKESIKNSTSSMTAVPKPLKFLRPTYPDLCSIYDKWTDPNLKSSLADVLSILAMTYSENGKHDSLRYRLLSDVSDFEGWGHEYIRHLALEIGEVYNDQVEKDAEDETSSDGSKSDGSAATSGFEFSKEDTLRLCLDIVPYFLKHNGEEDAVDLLLEIESIDKLPQFVDENTFQRVCQYMVACVPLLPPPEDVAFLKTAYSIYLSQNELTDAIALAVRLGEEDMIRSVFDATSDPVMHKQLAYILAAQKTSFEYEGVQDIIGNGKLSEHFLYLAKELNLTGPKVPEDIYKSHLDNSKSVFSSAGLDSAQQNLASSFVNGFLNLGYCNDKLIVDNDNWVYKTKGDGMTSAVASIGSIYQWNLDGLQQLDKYLYVDEPEVKAGALLGIGISASGVHDGEVEPALLLLQDYVTNPDTKISSAAILGLGIAFAGSKNDEVLGLLLPIAASTDLPIETAAMASLALAHVFVGTCNGDITTSIMDNFLERTAIELKTDWVRFLALALGILYMGQGEQVDDVLETISAIEHPMTSAIEVLVGSCAYTGTGDVLLIQDLLHRLTPKNVKGEEDADEEETAEGQTNSISDFLGEQVNEPTKNEEAEIEVDEMEVDAEGEEVEVKAEITEKKNGESLEGEEIKSEEKKGKSSDKDATTDGKNDDEEEEKEAGIVDELAYAVLGIALIALGEDIGKEMSLRHFGHLMHYGNEHIRRMVPLAMGIVSVSDPQMKVFDTLTRFSHDADLEVSMNSIFAMGLCGAGTNNARLAQLLRQLASYYSREQDALFITRLAQGLLHLGKGTMTMDVFNDAHVLNKVTLASILTTAVGLVSPSFMLKHHQLFYMLNAGIRPKFILALNDEGEPIKVNVRVGQAVETVGQAGRPKKITGWITQSTPVLLNHGERAELETDEYISYTSHIEGVVILKKNPDYREEE

SEQ ID NO: 2439 - protein, 891 aa, Schizosaccharomyces pombe
MAYPGQFGNYGNPETYRQNVAGNIASYGGPEIDTQLAAQMNAQMYIQQGSAMAPQPRRARRHKDAHAYDMSLTDAEPALAPVMSPAIPPSMNYPTPSTPSVLPESFSNDTNLLDPAALPSAPEVRYEDQQLFKNQIFNTMEKGSPPMSTTDFVGYEQGNSSSKFVQFTSYAIPATNDVCNASGIPLGMIVQPFAELRPDEAPVPVVDNTNSNPPRCKKCRGYINPFIQFTMASSKWTCNLCGSENSFNDDGFNPLVGSQHDGVESRPELNVGTIDFKVGKDYWIKEDPPKPARFVFMIDVSYEASSKGLPKVAAEAIRNILYGPVPLDPNVKIAIVCFDRSVNFFNLSPNLEQPHMLAASDLENPFVPFSSGLFVDPIASKVVIERLLDSFPAIFQDVKIPEPVVGNALEVVKLLLKETGGKAFVFVSALPTMGLGKLRHREDQRLYGTSDEKNLWNTQDKWYTSLADEYVTAGIGVDIFFTATAYVDVATVGSVATLSGGQIYHYSNFVADRDGSRLKQDLFRSVTREQGYRVMLKTRCSNGLRVSKYLGNFLQRTPQDIEFGSLDADKSVTVLFSYDGKLNGALDAHFQTAVLYTTPSGERRVRVVNYCCAVTSKSYDTISLAIVEPIVAVLAKIASTNIAAGSLKDTSVRLVEGVVKILSSYRKVAANRLTPGQLVLPKNLVLLPILILAVLKSSAIRSGSIHSDIRVSQLREVRAAPIQELMLNLYPNIYALHQLQPTDCLPDPENTGCLPINMPLCVRASRKFIEDGGAFLIVTGQKSYLWFHQRTSPLLLQDLLGVESLEDIDSLKALELPTLDTVLSVQVRNLLSSLRMQFPSMALHPQIVRQGLDGSEGEIFSTLVEDNTREGFGYLDFLTKIHESLHTQGYK

SEQ ID NO: 2440 - protein, 143 aa, Agaricus bisporus
MTYTISIRVYQTTPKGFFRPVERTNWKYANGGTWDEVRGEYVLTMGGSGTSGSLRFVSSDTDESFVATFGVHNYKRWCDIVTNLTNEQTALVINQEYYGVPIRDQARENQLTSYNVANAKGRRFAIEYTVTEGDNLKANLIIG

SEQ ID NO: 2441 - protein, 381 aa, Schizosaccharomyces pombe
MDTEMSVNMSDFLHDQATRAPESLQQSYILMEDLYERKLWKQLTDALIVFFDTPETVPLRLPLYTNFVNSFRPNINQLKAVYMGLKAFESCSNDEALRNLNQIVNELDEEKYKDAYVYSIVAIARIKLISGKLDEARELLVKASKIIDHIDYVESLIHSSYYSVSADYYKAKADYAQYYRHCLLYLSCIDLDKCSHTELVERAVDLSVAAILGDIYNFGELLLHPVFELLVGTQHEWLHDLVIAMNVGDLPLFERLMGQINKMPLLQSSVALLGQKIRLMALIELVFQLPPNQRTLTFDTIARATRIPSNEVELLIMRALSVGLITGVIDEVTQIVTISSVQSRILNHSQIASMESRLREWNQNIKNLSNVVEISGKGVFV

SEQ ID NO: 2442 - protein, 247 aa, Schizosaccharomyces pombe
MFMTRSEYDRGVNTFSPEGRLFQVEYAIEAIKLGSTAIGVKTKDAVVLGVEKRLTSPLMESHSVEKLFEIDSHIGCAISGLTADARTIIEHARVQTQNHRFTYDEPQGIESTTQSICDLALRFGEGEDGEERIMSRPFGVALLIAGIDEHGPQLYHSEPSGTYFRYEAKAIGSGSEPAKSELVKEFHKDMTLEEAEVLILKVLRQVMEEKLDSKNVQLAKVTAEGGFHIYNDEEMADAVAREQQRMD

SEQ ID NO: 2443 - protein, 172 aa, Saccharomyces cerevisiae
MSTPARRRLMRDFKRMKEDAPPGVSASPLPDNVMVWNAMIIGPADTPYEDGTFRLLLEFDEEYPNKPPHVKFLSEMFHPNVYANGEICLDILQNRWTPTYDVASILTSIQSLFNDPNPASPANVEAATLFKDHKSQYVKRVKETVEKSWEDDMDDMDDDDDDDDDDDDDEAD

SEQ ID NO: 2444 - protein, 534 aa, Candida albicans
MSSNKNQSDLNIPTNSASLKQKQRQQLGIKSEIGASTSDVYDPQVASYLSAGDSPSQFANTALHHSNSVSYSASAAAAAAELQHRAELQRRQQQLQQQELQHQQEQLQQYRQAQAQAQAQAQAQAQAQREHQQLQHAYQQQQQLHQLGQLSQQLAQPHLSQHEHVRDALTTDEFDTNEDLRSRYIENEIVKTFNSKAELVHFVKNELGPEERCKIVINSSKPKAVYFQCERSGSFRTTVKDATKRQRIAYTKRNKCAYRLVANLYPNEKDQKRKNKPDEPGHNEENSRISEMWVLRMINPQHNHAPDPINKKKRQKTSRTLVEKPINKPHHHHLLQQEQQQQQQQQQQQQQQQQQQQQQQHNANSQAQQQAAQLQQQMQQQLQASGLPTTPNYSELLGQLGQLSQQQSQQQQLHHIPQQRQRTQSQQSQQQPQQTPHGLDQPDAAVIAAIEASAAAAVASQGSPNVTAAAVAALQHTQGNEHDAQQQQDRGGNNGGAIDSNVDPSLDPNVDPNVQAHDHSHGLRNSYGKRSGFL

SEQ ID NO: 2445 - protein, 335 aa, Candida albicans
MAIKIGINGFGRIGRLVLRVALGRKDIEVVAVNDPFIAPDYAAYMFKYDSTHGRYKGEVTASGDDLVIDGHKIKVFQERDPANIPWGKSGVDYVIESTGVFTKLEGAQKHIDAGAKKVIITAPSADAPMFVVGVNEDKYTPDLKIISNASCTTNCLAPLAKVVNDTFGIEEGLMTTVHSITATQKTVDGPSHKDWRGGRTASGNIIPSSTGAAKAVGKVIPELNGKLTGMSLRVPTTDVSVVDLTVRLKKAASYEEIAQAIKKASEGPLKGVLGYTEDAVVSTDFLGSSYSSIFDEKAGILLSPTFVKLISWYDNEYGYSTRVVDLLEHVAKASA

SEQ ID NO: 2446 - protein, 523 aa, Saccharomyces cerevisiae
MASTAVMMDVDSSGVNDLHHSEKKYAEEDQVQELLKVLNEISKTTLTLDPRYIWRSLKDLSSLRNQELLNAETLCFTVNVLYPDSSSFKKNLLKFITSNHKSSVPGSAELRNSYPASFYSVNTEKKTIEVTAEINCFMHLLVQLFLWDSKELEQLVEFNRKVVIPNLLCYYNLRSLNLINAKLWFYIYLSHETLARSSEEINSDNQNIILRSTMMKFLKIASLKHDNETKAMLINLILRDFLNNGEVDSASDFISKLEYPHTDVSSSLEARYFFYLSKINAIQLDYSTANEYIIAAIRKAPHNSKSLGFLQQSNKLHCCIQLLMGDIPELSFFHQSNMQKSLLPYYHLTKAVKLGDLKKFTSTITKYKQLLLKDDTYQLCVRLRSNVIKTGIRIISLTYKKISLRDICLKLNLDSEQTVEYMVSRAIRDGVIEAKINHEDGFIETTELLNIYDSEDPQQVFDERIKFANQLHDEYLVSMRYPEDKKTQQNEKSENGENDDDTLDGDLMDDMSDISDLDDLGFL

SEQ ID NO: 2447 - protein, 1029 aa, Schizosaccharomyces pombe
MPLSFEGTFKAKRNVNLGGKRVSNDRAQLLRKAAMERKNREEERKAENNSVAVQSLSRGFLARRKFKQDFRERWIYKYTKSGRTSIRFNTLEDIKCSISLLVLFAEPDIDLPFVSQVAHNILVWLENLIPLSNGMDDTPKSHLKVKILKVQETLSNSNDSWLWQRFSSLLLNCLVSSINSHRIEGTDTSAETSLLHCLAYVAPYLKSSELSTYYDSVMTFYAQIYPKQNMTNLEDIMSLSLLTPVSSKTDENANSSSAFLFHVLASDCFSSIENCIPPDLIIDKVFSSSLQLSEEACISSLLNLGMIKVFSLAGNCLHLLHTEYKNSSLWKFCSYILDALYVFSGESVNSRIQVVSDVDDDEDDENAFSQNYYSHLQMVAKHFSKNYANQSGIVQRSFAECISSTFITKAFKLVSSNTLQAMSHFYATMIKLFPSNRTSILMYISLVETNEGSLTRSFSRFSWDMFSESPVYQLFHKKFDVQNVLKNDSGYWFQLQLLIDVYSRMLFTMIDDEFHNDKQNPLYPVMAEFCTVLKNLVLGLYWDVQAAKDVDCKSVVDISQLRVSSTSLLQQLYRINSRKQFLPEDFFLMSEYFNLNEFEANALQESELASHAEAEINITYKFDNFSESRPRLNILNNCSFFLPFHFRIHLLQQLLLLDKQANGYAQPFGHLKHAVIRRNRIFDDGFDAFYNFGKLLKGPIRITFVDEHGVVEEGIDGGGLTKEFLTSICKTVFDINYGLFSETKAHLLYPNTHAYAQDVERLRCYEFLGMLIGKCIYEGIQIDAAFASFFVAKWLGHPSYFDDLTSLDPNLYEGLVFLKNYDGDVENDMALNFTVVHEEFGVRNVIDLIPNGSNISVTNENRLQYIHLVSNYYLNARLSRQCRAFTNGFTQIIDPHWLAMFHESEIQILVGGDPVPIDIDDLRRHTVYAGGYEPNSPTIVLFWEVLREFEEEDKRSFVKFVTSVARPPILGFKALMPSFCIRVNGEDETRLPTASTCVNLLKLPMYSTKQTLRDKLLTAVRSGVGFGFS

SEQ ID NO: 2448 - protein, 1242 aa, Saccharomyces cerevisiae
MAPATPKTSKTAHFENGSTSSQKKMKQSSLLSFFSKQVPSGTPSKKVQKPTPATLENTATDKITKNPQGGKTGKLFVDVDEDNDLTIAEETVSTVRSDIMHSQEPQSDTMLNSNTTEPKSTTTDEDLSSSQSRRNHKRRVNYAESDDDDSDTTFTAKRKKGKVVDSESDEDEYLPDKNDGDEDDDIADDKEDIKGELAEDSGDDDDLISLAETTSKKKFSYNTSHSSSPFTRNISRDNSKKKSRPNQAPSRSYNPSHSQPSATSKSSKFNKQNEERYQWLVDERDAQRRPKSDPEYDPRTLYIPSSAWNKFTPFEKQYWEIKSKMWDCIVFFKKGKFFELYEKDALLANALFDLKIAGGGRANMQLAGIPEMSFEYWAAQFIQMGYKVAKVDQRESMLAKEMREGSKGIVKRELQCILTSGTLTDGDMLHSDLATFCLAIREEPGNFYNETQLDSSTIVQKLNTKIFGAAFIDTATGELQMLEFEDDSECTKLDTLMSQVRPMEVVMERNNLSTLANKIVKFNSAPNAIFNEVKAGEEFYDCDKTYAEIISSEYFSTEEDWPEVLKSYYDTGKKVGFSAFGGLLYYLKWLKLDKNLISMKNIKEYDFVKSQHSMVLDGITLQNLEIFSNSFDGSDKGTLFKLFNRAITPMGKRMMKKWLMHPLLRKNDIESRLDSVDSLLQDITLREQLEITFSKLPDLERMLARIHSRTIKVKDFEKVITAFETIIELQDSLKNNDLKGDVSKYISSFPEGLVEAVKSWTNAFERQKAINENIIVPQRGFDIEFDKSMDRIQELEDELMEILMTYRKQFKCSNIQYKDSGKEIYTIEIPISATKNVPSNWVQMAANKTYKRYYSDEVRALARSMAEAKEIHKTLEEDLKNRLCQKFDAHYNTIWMPTIQAISNIDCLLAITRTSEYLGAPSCRPTIVDEVDSKTNTQLNGFLKFKSLRHPCFNLGATTAKDFIPNDIELGKEQPRLGLLTGANAAGKSTILRMACIAVIMAQMGCYVPCESAVLTPIDRIMTRLGANDNIMQGKSTFFVELAETKKILDMATNRSLLVVDELGRGGSSSDGFAIAESVLHHVATHIQSLGFFATHYGTLASSFKHHPQVRPLKMSILVDEATRNVTFLYKMLEGQSEGSFGMHVASMCGISKEIIDNAQIAADNLEHTSRLVKERDLAANNLNGEVVSVPGGLQSDFVRIAYGDGLKNTKLGSGEGVLNYDWNIKRNVLKSLFSIIDDLQS

SEQ ID NO: 2449 - protein, 393 aa, Saccharomyces cerevisiae
MFNNHEIDTILSTLRMEADPSLHPLFEQFEKFYEEKLWFQLSESLTKFFDDAKSTPLRLRLYDNFVSKFYDKINQLSVVKYLLASLKDSKDFDESLKYLDDLKAQFQELDSKKQRNNGSKDHGDGILLIDSEIARTYLLKNDLVKARDLLDDLEKTLDKKDSIPLRITNSFYSTNSQYFKFKNDFNSFYYTSLLYLSTLEPSTSITLAERQQLAYDLSISALLGDKIYNFGELLHHPIMETIVNDSNYDWLFQLLNALTVGDFDKFDSLIKVQISKIPILAQHESFLRQKICLMTLIETVFVKNIRMLSFEDISKATHLPKDNVEHLVMRAISLGLLKGSIDQVNELVTISWVQPRIISGDQITKMKDRLVEWNDQVEKLGKKMEARGQSIWV

SEQ ID NO: 2450 - protein, 215 aa, Saccharomyces cerevisiae
MNGIQVDINRLKKGEVSLGTSIMAVTFKDGVILGADSRTTTGAYIANRVTDKLTRVHDKIWCCRSGSAADTQAIADIVQYHLELYTSQYGTPSTETAASVFKELCYENKDNLTAGIIVAGYDDKNKGEVYTIPLGGSVHKLPYAIAGSGSTFIYGYCDKNFRENMSKEETVDFIKHSLSQAIKWDGSSGGVIRMVVLTAAGVERLIFYPDEYEQL

SEQ ID NO: 2451 - protein, 176 aa, Schizosaccharomyces pombe
MDSDMQNQNPHTNSKNSSSAGMAVDGHSVTKRLRSELMSLMMSNTPGISAFPDSDSNLLHWAGTITGPSDTYYEGLKFKISMSFPANYPYSPPTIIFTSPMWHPNVDMSGNICLDILKDKWSAVYNVQTILLSLQSLLGEPNNASPLNAQAAELWSKDPIEYKRLLMQRYKEIDEI

SEQ ID NO: 2452 - protein, 411 aa, Phaeosphaeria nodorum
MADFFNLKARQQAAAQASSSKTPTSKQESNRLQPWVEKYRPKTLSEVTAQDNTIQILSRTLQSSNLPHMLFYGPPGTGKTSTILALAKQLYGPELMKSRVLELNASDERGISIVRQKVKDFARQQLSVAPTYNVMTEDKDGGEAKMVRYRDKYSCPPFKIIVLDEADSMTQDAQSALRRTMETYSRMTRFCLVCNYVTRIIDPLASRCSKFRFKSLDQGNAVRRVDDIAKLEDVKLDAGVSEELVRVADGDLRKAITFLQSAARLVGATQTAGRKKKVVVDDEDEMDIDPPSAPSKTTISLEQIAEIAGVIPAPTLASFSDALFPKSAAKSIRYNEIAKVVENMIAEGWSASQTVSQLYEQVMFDERVEDIKKVRLAGVFSETDKRLVDGGDEHLAVLDLGVRVAGVLCMG

SEQ ID NO: 2453 - protein, 464 aa, Saccharomyces cerevisiae
MALTQFENDLEILRDMYPELEMKSVKVEEEGEFPQRINGKLLFKISLLADVNIEFGEQHMLLSNLSNECVEFTIYSCHYPDIRRCVVMDIKSLWISTDEKKMLIDKALRLVEETVDMSIEFADSFTSILILIFGFLIDDTAILLFPNGIRKCLTQDQYDLFKQISEEATLQKVSRSNYHCCICMEMEKGVRMIKLPCENANVEHYLCRGCAKSYFTAMIQENRISSVRCPQCEYKELKLEDFKSYKKMLKALFTPLIPVSFLKEVIDTELCERYEKMFYNQAATRLSKYCPYACVTCRRCDSWCTKEDLDDAMIQCQKCHFVFCFDCLHAWHGYNNKCGKKVSLSTDIIEEYLDDTVTSYERKRKLEAKYGRRVLELEVNDYLAEKMLDLAIKKEGSNLQRCPKCKVVVERSEGCNKMKCEVCGTLFCFICGVLLYPEDPYEHFREAYSGCYGRLFEGMPGTET

SEQ ID NO: 2454 - protein, 723 aa, Saccharomyces cerevisiae
MFRSHASGNKKQWSKRSSNGSTPAASASGSHAYRQQTLSSFFMGCGKKSAAASKNSTTIIDLESGDEGNRNITAPPRPRLIRNNSSSLFSQSQGSFGDDDPDAEFKKLVDVPRLNSYKKSSRSLSMTSSLHKTASASTTQKTYHFDEDETLREVTSVKSNSRQLSFTSTINIEDSSMKLSTDSERPAKRSKPSMEFQGLKLTVPKKIKPLLRKTVSNMDSMNHRSASSPVVLTMEQERVVNLIVKKRTNVFYTGSAGTGKSVILQTIIRQLSSLYGKESIAITASTGLAAVTIGGSTLHKWSGIGIGNKTIDQLVKKIQSQKDLLAAWRYTKVLIIDEISMVDGNLLDKLEQIARRIRKNDDPFGGIQLVLTGDFFQLPPVAKKDEHNVVKFCFESEMWKRCIQKTILLTKVFRQQDNKLIDILNAIRYGELTVDIAKTIRNLNRDIDYADGIAPTELYATRREVELSNVKKLQSLPGDLYEFKAVDNAPERYQAILDSSLMVEKVVALKEDAQVMMLKNKPDVELVNGSLGKVLFFVTESLVVKMKEIYKIVDDEVVMDMRLVSRVIGNPLLKESKEFRQDLNARPLARLERLKILINYAVKISPHKEKFPYVRWTVGKNKYIHELMVPERFPIDIPRENVGLERTQIPLMLCWALSIHKAQGQTIQRLKVDLRRIFEAGQVYVALSRAVTMDTLQVLNFDPGKIRTNERVKDFYKRLETLK

SEQ ID NO: 2455 - protein, 486 aa, Schizosaccharomyces pombe
MRKERPGVLFNKIRSYFICPGCNCLPDWPVTLPCGGTVCRKCFRNAYSSESSGKVSPSRCCFYNHKKPHYSVETEVKDVIISKVVELIKTTEFQISQQSLVPLELKEEICHDDCLSSSPPCTSALTEITLLPPTFHNLIPSSSSYETAVAEFLHMEDLLQENVSRELECQICFGMLYDPVVSPCGHTFCGPCLMQALTQSPQCPTCRFGLPSPVVLEHAKSHSITTFLRDFYPDNWLERQKSWEEEKEQESWLPLFISMLAYPRMPTFLHIFELRYHIMIKKCLETSKRFCIAMPLRARSDGHNEHRELRNARGQRLFCSEYGTILEIIQVEPLIDGRSLVEARGSYCVRIIDFRADGLFPRVKIEKHYDTPLRATPLQFPEPEYLLMYGNLSNEELVERIDAFYMNARRTYVHWVVPLIDIKMEARQSIADLSYKITNLLPISELEKTRILQVDNPTDRLVLVLIWLTQLQESWWYRVGSACTIA

SEQ ID NO: 2456 - protein, 964 aa, Saccharomyces cerevisiae [sequence omitted]

SEQ ID NO: 2457 - protein, 891 aa, Schizosaccharomyces pombe
MSSKDISSKSPSGNDALNDKKGTKTSETNDRNSTNNTKERDELEDLSEEDLQLKNDLELLVQAVQDATPELVGSSLTQLKEIIRTSTSSMTAVPKPLKFLRPHYFTLVKIYDSWPQSPQKTQLADILSVLGMSYSNTSKHESLKYRLQGVTTDPSLWGHEYVRHLASEIEEEFASRQEEEAPTDDLMELALTIVPFFLTHNAEADAIDLLQELGAIEKVVPFVELDNASRVCLYITSCVNLLPFPEDVAMLRTAHAIYRKFDQLTQALNVAIRLDDMSLIKEDCEAATDPLLKKQMSYMLARQQIPMDMGDEELNDALNNTHLSDHFHYLGKELNLMDPKVPEDIFKTHLEVARTGLGASGVYSAKQNLANTFVNALVNAGYSNDRLILVDDEKTSWIYKNKESGLISATASIGLLQLWNVDMGLSLLDKYLYSSEENTKAGALLGIGVTNVAVRNEADPAMAILSEYLETGSVKLRASAILGLGLAYSGANREDLLDMLSPIVTDTDCPMQLSCLAALSLGLIFVGTCNGDVASTILQTLMEREESAQNDQWGRFMALGLALLFNGKQDLADATVETLKAIEGKIARQAEILVDICSYAGTGNVLHIQKLLHICSEPPSDDAKESETTIQTFAALGVATIAMGEDIGAEMVLRHFDHMMHYGEPSIRKAIPLALGLLSASNPQMRIFDTLSRYSHDNDLDVAYNAIFAMGLVGAGTSNARLAQLLRQLASYYHKESNALFMVRIAQGLLYLGKGTMTLNPYHTERQILGQTAFAGLMTVVLAMLDANTFVLDTSHWLLYAITLAIRPRMLITLGEDGQYLPVSVRVGQAVDVVGQAGRPKVITGWVTHTTPVLLHHNERAELATEAYTPLTSLEGIVILKKNTEDIEMTA

SEQ ID NO: 2458 - protein, 205 aa, Saccharomyces cerevisiae
MSDPSSINGGIVVAMTGKDCVAIACDLRLGSQSLGVSNKFEKIFHYGHVFLGITGLATDVTTLNEMFRYKTNLYKLKEERAIEPETFTQLVSSSLYERRFGPYFVGPVVAGINSKSGKPFIAGFDLIGCIDEAKDFIVSGTASDQLFGMCESLYEPNLEPEDLFETISQALLNAADRDALSGWGAVVYIIKKDEVVKRYLKMRQD

SEQ ID NO: 2459 - protein, 166 aa, Schizosaccharomyces pombe
MSKAMALRRLMKEYKELTENGPDGITAGPSNEDDFFTWDCLIQGPDGTPFEGGLYPATLKFPSDYPLGPPTLKFECEFFHPNVYKDGTVCISILHAPGDDPNMYESSSERWSPVQSVEKILLSVMSMLAEPNDESGANIDACKMWREDREEYCRVVRRLARKTLGL

SEQ ID NO: 2460 - protein, 338 aa, Blastobotrys adeninivorans
MDKGKKVETVEKQENSLPWVEKYRPTTLDEVAGHEGVITTIKKFVEEGKLPHLLFHGPPGTGKTTTIIAVARQIYGKNYRNMILELNASDERGIDVVRDQIKTFASTRQIFSSGFKLVILDEADAMTNAAQNALRRIIEKYSAHTRFCILANYTHKLNPALLSRCTRFRFSPLKEDAIKHRLAHVIEQESVDLSPEAFQSLLHLSSGDMRRALNVLQACYASVDAGEQISEELVYDCVGSPRPADIRTVLQAVLDGSWESALHTFSYIKQSKGLALADMLTAFAVEFQKLDLQNKTRIALLDGLSEIEWRLSSGGNESIQTSATIGVIKQSMELEASS

SEQ ID NO: 2461 - protein, 435 aa, Schizosaccharomyces pombe
MLEVEVESDNKHLVADELIALQSIYPEIHLDGNNYGRLNIPVNTESDYFLSFKSPDESTLTDTIVVRHFPDLVMEFFLPEAYPFNSPPTFFLKSSWLPLKQKRVLTSSLIKLWNEIHDCVLFDAIEHVRSIATIAFHLPTEMVFPGGFDDLKKEILAFDKNAKLLEFQIRKFQCNVCFDEFNGTDCFQLTRCGHVSCQSCLRDYYTMCIQEGMFSQIKCIDLDCGKDAPVLTLKELESIVGVQLTNRYKELEEKRRYENDSNIIFCPRSFCQGPSKRDPGQKLAICQKCDFAFCSFCQATWHGDLSPCKLEGDSKKLVEMYLNYQENEPEKALELEKRYGKRIIDRLVEQVKNDEEAEKWVLLNGQRCPTCDRVVERIDGCCHMNCLCGTHFCFLCGAYLMEQNPYKHFNDPVSSCYGMLFASAAEKQRFSENWT

SEQ ID NO: 2462 - protein, 278 aa, Saccharomyces cerevisiae
METSNFVKQLSSNNRKTRVNALEALKKYLTAKQFKENKQIEFNKLWKGLYYAMWFSDRPRPQQRLANELGELHGLYFDPKDNSTADELTTNDKAFIKFSRGFWKVMCFEWFNIDRYRLDKYLLLIRRVLFSQLKYLQSRNWDKKLVDEYIKKVLRWLPLSGSPKVYTGIPIHIVDILLDEWERLLKDGDEDDEDEENKEEEMRKIAESAKKTPLADVIAIFQDIVADYNNSKVLREKIKEDLFSDTRLVSWDILEGETQHNDSSNESEEEEEEEWKGF

SEQ ID NO: 2463 - protein, 508 aa, Saccharomyces cerevisiae
MKYLNLVFVLQLLISIKYASFGRAFSLFEDDTTFANLDKQLKLPQNTQQTLKLDRLNHDDPLFTTFISSVDTDYSLRLRTVDPSKLGIDTVKQWSGYMDYKDSKHFFYWFFESRNDPANDPIILWLNGGPGCSSFTGLLFELGPSSIGADMKPIHNPYSWNNNASMIFLEQPLGVGFSYGDEKVSSTKLAGKDAYIFLELFFEAFPHLRSNDFHIAGESYAGHYIPQIAHEIVVKNPERTFNLTSVMIGNGITDPLIQADYYEPMACGKGGYHPVLSSEECEKMSKAAGRCRRLNKLCYASKSSLPCIVATAYCDSALLEPYINTGLNVYDIRGPCEDNSTDGMCYTGLRYVDQYMNFPEVQETLGSDVHNYSGCDNDVFTGFLFTGDGSKPFQQYIAELLNHNIPVLIYAGDKDYICNWLGNHAWSNELEWINKRRYQRRMLRPWVSKETGEELGQVKNYGPFTFLRIYDAGHMVPYDQPEASLEMVNSWISGNRAFSDLSTLENAS

SEQ ID NO: 2464 - protein, 1018 aa, Saccharomyces cerevisiae; identical to SEQ ID NO: 2371

SEQ ID NO: 2465 - protein, 128 aa, Schizosaccharomyces pombe; identical to SEQ ID NO: 2422

SEQ ID NO: 2466 - protein, 241 aa, Saccharomyces cerevisiae
MATIASEYSSEASNTPIEHQFNPYGDNGGTILGIAGEDFAVLAGDTRNITDYSINSRYEPKVFDCGDNIVMSANGFAADGDALVKRFKNSVKWYHFDHNDKKLSINSAARNIQHLLYGKRFFPYYVHTIIAGLDEDGKGAVYSFDPVGSYEREQCRAGGAAASLIMPFLDNQVNFKNQYEPGTNGKVKKPLKYLSVEEVIKLVRDSFTSATERHIQVGDGLEILIVTKDGVRKEFYELKRD

SEQ ID NO: 2467 - protein, 215 aa, Saccharomyces cerevisiae
MSRAKRIMKEIQAVKDDPAAHITLEFVSESDIHHLKGTFLGPPGTPYEGGKFVVDIEVPMEYPFKPPKMQFDTKVYHPNISSVTGAICLDILKNAWSPVITLKSALISLQALLQSPEPNDPQDAEVAQHYLRDRESFNKTAALWTRLYASETSNGQKGNVEESDLYGIDHDLIDEFESQGFEKDKIVEVLRRLGVKSLDPNDNNTANRIIEELLK

SEQ ID NO: 2468 - protein, 352 aa, Neurospora crassa
MALIVDKHRPRSLDALTYHTELSERLRSLAQSGDFPHLLVYGPSGAGKKTRIVATLKELYGPGVEKIKIDARVFQTSSNRKLEFNIVASVYHLEITPSDVGNYDRVVVQDLLKEVAQTQQVDLSAKQRFKVVVINEADHLTRDAQAALRRTMEKYSPNLRLILLANSTANIIAPIRSRCLLVRVAAPTHKEICDVLASSAKKEGWPIVKGLHQRIAEESGRNLRRALLMYEAVYAQNEKVTDSTPIPPPDWEALIGQIAKEIMEEHTPARILQVRAKLYDLLTHCIPATIILKTLTFKLIPLIDDALKADVIYWSAFYEHRIRTGTKVIFHLEAFVAKFMRIFEMYLMSMDL

SEQ ID NO: 2469 - protein, 919 aa, Candida albicans
MKVVSNFIFTILLTLNLSAALEVVTSRIDRGGIQGFHGDVKVHSGATWAILGTTLCSFFGGLEVEKGASLFIKSDNGPVLALNVALSTLVRPVINNGVISLNSKSSTSFSNFDIGGSSFTNNGEIYLASSGLVKSTAYLYAREWTNNGLIVAYQNQKAAGNIAFGTAYQTITNNGQICLRHQDFVPATKIKGTGCVTADEDTWIKLGNTILSVEPTHNFYLKDSKSSLIVHAVSSNQTFTVHGFGNGNKLGLTLPLTGNRDHFRFEYYPDTGILQLRAAALPQYFKIGKGYDSKLFRIVNSRGLKNAVTYDGPVPNNEIPAVCLIPCTNGPSAPESESDLNTPTTSSIETSSYSSAATESSVVSESSSAVDSLTSSSLSSKSESSDVVSSTTNIESSSTAIETTMNSESSTDAGSSSISQSESSSTAITSSSETSSSESMSASSTTASNTSIETDSGIVSQSESSSNALSSTEQSITSSPGQSTIYVNSTVTSTITSCDENKCTEDVVTIFTTVPCSTDCVPTTGDIPMSTSYTQRTVTSTITNCDEVSCSQDVVTYTTNVPHTTVDATTTTTTSTGGDNSTGGNESGSNHGSGAGSNEGSQSGPNNGSGSGSEGGSNNGSGSGSDSGSNNGSGSGSNNGSGSGSNNGSGSGSGSTEGSEGGSGSNEGSNHGSNEGSGSGSGSQTGSGSGSNNGSGSGSQSGSGSGSQSGSESGSNSGSNEGSNPGAGNGSNEGSGQGSGNGSEAGSGQGSGPNNGSGSGHNDGSGSGSNQGSNPGAGSGSGSESGSNAGSHSGSNEGAKTDSIEGFHTESKPGFNTGAHTDATVTGNSVANPVTTSTESDTTISVTVSITSYMTGFDGKPKPFTTVDVIPVPHSMPSNTTDSSSSVPTIDTNENGSSIVTGGKSILFGLIVSMVVLFM

SEQ ID NO: 2470 - protein, 152 aa, Saccharomyces cerevisiae
MQIFVKTLTGKTITLEVESSDTIDNVKSKIQDKEGIPPDQQRLIFAGKQLEDGRTLSDYNIQKESTLHLVLRLRGGGKKRKKKVYTTPKKIKHKHKKVKLAVLSYYKVDAEGKVTKLRRECSNPTCGAGVFLANHKDRLYCGKCHSVYKVNA

SEQ ID NO: 2471 - protein, 1647 aa, Schizosaccharomyces pombe
MSVQAYTNTPNLPNLIHSESITNSPVFIPNLRSKSDNKHRLNTSEELPFTKKRRATKHFLKMEVSAKISEPPSSKSVEFGRHLNMRHDFSELLEQPLTTSKTRVFKSFNEKLKGKPQLVKSDKGVLPLNKQSDILNSYERVLSNASVDSALDKKAEVDIIPFDKSVMEPKNITFNDKSGLTKFGNSNSYETTYSDSSNYHTSTDSSQYNDQDDHVYDDTNDGTDDDINNNEYKDDESSSGSESYERDEDVDEEEEEDDDENNDEGDDEDENENDELRSENGSPNPSAAVINEQENMNMSGIEEYDETNLLNELGRIRRGNQFQSLASSILSSGNLENSDDEDVSLGPQTYRFNSSFHPFRSAFSAPGVQFGRLLEGIKDFSDPTVQMLSLQELSEAFAMSTEDMLVGLFSTDSYIAAFSEILSGRNYDFGEVSIQLMLSCTTCVSNMMEALPLCMAKIAYSPIVRILCERMFDMQYIDIAEQALGVLERLSKDFGICILEHRGMLAALQYFDFFYTTVQRTAISLAANCCKFLDESNASAAEEIIPLLSNILQSSDTIVVSKAYSCLETIIESLKTSPNIIETIISEDLITTIVNALTNSTSQNKSMHLQVQLLHIISSLCQSSSALILPFLNHNLPDVMYEMLCGIPPSDTSHQADMITMQSLYYCPIELIENLLRAITSLLPKNTSNLSDEFNTKLYRLNSILLTVVMDIYFIVPLHDIRSLAVTTALKMLCSIRENNLDGLVCSLPLSSFIASILNSRKSDNFLKRDALEMCLFLLEALPNVYSSLFIREGVVQEVGFLVRSTNADMKKIKLSISFSQNKSAARHEELKNLSTLKSLAKEFLSNYKEENLENSTLVQLKQLSKHLLSETKQDESFSELAKIFQEGSNITSHELLHSGLIHNLLLSLKKFGSSSLRTFLLAMNTCDEREVLEFGNGPLVSLIFCLQNLLSTVENFQLSTLPPDTENAVDHVFSRQFKLRLMALPGSRIRPPFRSLVVSINGLATIRTLDNYLHSRISVRNETGRRFSILREAGSLRESMSGSSRNSSGDYTDSMSQDAPNHTTEPSERRDSSTSSHFEEHFVFSLMGKKVPRNKTIFRILYEYIQLSDDHTLDDFWKTPVPIFYGEPDCIHNDMKGELNYENETEGFSINIREILDLLSILYYGIRDVHTLFPDKHFRGNIENILTDFSNWKLSAKLNRQLEEQQLVVHGCLPSWCISLTSAYPFLVPFETRYLLLQSTAFGLSRSVSFLLSRNPELSKNESSSILQFVSLHRQKIRISRKKIFNYALHLLATYAASENILEIEYEDEVGSGLGPTLEFYTSVSKEFTLNSLDIWRNDQPNSKFVYQASGLFPSPIPLLGSSPENERKISLFFALGQFVARSIYDSRIISIQFNPLFFARNIPLTISSVAKVDKGLANSLRYLEKLIPGKNPTNAETDIKLEDLHLDFTLPGFPSIELIPDGASTPVTTFNVSDYLNYVIDYTVGKGVQQQLEAFQNGFSSVFPYTSLQVLTEHELVTLFGTVDEDWSYATLMKSIVADHGYTMESPTIQRLLTLMSQMNFQEQRDFLQFITGSRKLPIGGFAGLNPPLTVVRRLNEPPYVPDDYLPSVMTCVNYLKLPEYSSSEVLGSRLSKAILEGQGSFHLS

SEQ ID NO: 2472 - protein, 952 aa, Saccharomyces cerevisiae
MPIVRWLLLKSAVRGSSLIGKAHPCLRSIAAHPRYLSNVYSPPAGVSRSLRINVMWKQSKLTPPRFVKIMNRRPLFTETSHACAKCQKTSQLLNKTPNREILPDNVVPLHYDLTVEPDFKTFKFEGSVKIELKINNPAIDTVTLNTVDTDIHSAKIGDVTSSEIISEEEQQVTTFAFPKGTMSSFKGNAFLDIKFTGILNDNMAGFYRAKYEDKLTGETKYMATTQMEPTDARRAFPCFDEPNLKASFAITLVSDPSLTHLSNMDVKNEYVKDGKKVTLFNTTPKMSTYLVAFIVAELKYVESKNFRIPVRVYATPGNEKHGQFAADLTAKTLAFFEKTFGIQYPLPKMDNVAVHEFSAGAMENWGLVTYRVVDLLLDKDNSTLDRIQRVAEVVQHELAHQWFGNLVTMDWWEGLWLNEGFATWMSWYSCNEFQPEWKVWEQYVTDTLQHALSLDSLRSSHPIEVPVKKADEINQIFDAISYSKGASLLRMISKWLGEETFIKGVSQYLNKFKYGNAKTEDLWDALADASGKDVRSVMNIWTKKVGFPVISVSEDGNGKITFRQNRYLSTADVKPDEDKTIYPVFLALKTKNGVDSSVVLSERSKTIELEDPTFFKVNSEQSGIYITSYTDERWAKLGQQADLLSVEDRVGLVADVKTLSASGYTSTTNFLNLVSKWNNEKSFVVWDQIINSISSMKSTWLFEPKETQDALDNFTKQLISGMTHHLGWEFKSSDSFSTQRLKVTMFGAACAARDADVEKAALKMFTDYCSGNKEAIPALIKPIVFNTVARVGGAENYEKVYKIYLDPISNDEKLAALRSLGRFKEPKLLERTLGYLFDGTVLNQDIYIPMQGMRAHQEGVEALWNWVKKNWDELVKRLPPGLSMLGSVVTLGTSGFTSMQKIDEIKKFFATKSTKGFDQSLAQSLDTITSKAQWVNRDRDVVNKYLKENGYY

SEQ ID NO: 2473 - protein, 128 aa, Saccharomyces cerevisiae [sequence omitted]

SEQ ID NO: 2474 - protein, 451 aa, Saccharomyces cerevisiae
MDGNDHKVENLGDVDKFYSRIRWNNQFSYMATLPPHLQSEMEGQKSLLMRYDTYRKESSSFSGEGKKVTLQHVPTDFSEASQAVISKKDHDTHASAFVNKIFQPEVAEELIVNRYEKLLSQRPEWHAPWKLSRVINGHLGWVRCVAIDPVDNEWFITGSNDTTMKVWDLATGKLKTTLAGHVMTVRDVAVSDRHPYLFSVSEDKTVKCWDLEKNQIIRDYYGHLSGVRTVSIHPTLDLIATAGRDSVIKLWDMRTRIPVITLVGHKGPINQVQCTPVDPQVVSSSTDATVRLWDVVAGKTMKVLTHHKRSVRATALHPKEFSVASACTDDIRSWGLAEGSLLTNFESEKTGIINTLSINQDDVLFAGGDNGVLSFYDYKSGHKYQSLATREMVGSLEGERSVLCSTFDKTGLRLITGEADKSIKIWKQDETATKESEPGLAWNPNLSAKRF

SEQ ID NO: 2475 - protein, 156 aa, Saccharomyces cerevisiae
MAVEEGGCVTKRLQNELLQLLSSTTESISAFPVDDNDLTYWVGYITGPKDTPYSGLKFKVSLKFPQNYPFHPPMIKFLSPMWHPNVDKSGNICLDILKEKWSAVYNVETILLSLQSLLGEPNNRSPLNAVAAELWDADMEEYRKKVLACYEEIDDY

SEQ ID NO: 2476 - protein, 88 aa, =Saccharomyces cerevisiae
MTSKREKSLDHTLELKIPFETERQATIATKVLSPDPILKPQDFQVDYSSEKNVMLVQFRSIDDRVLRVGVSSIIDSIKTIVEAMDVLS

SEQ ID NO: 2477 - protein, 492 aa, Saccharomyces cerevisiae
MQDPNICQHCQLKDNPGALIWVKCDSCPQWVHVKCVPLKRIHYSNLTSSEVLSYPNSAKQIKSYRCPNHKEGEYLTAYALITQKGKRQRNKENPEDSHINKRYNFRKKKLLDYIALNEGESKRDKMNHPHKESFMKSFEKWKNGSNIINAADFAEKFDNIDVPYKIIDPLNSGVYVPNVGTDNGCLTVNYITEMIGEDYHVDVMDVQSQMNENWNLGSWNEYFTNTEPDRRDRIRNVISLEVSNIEGLELERPTAVRQNDLVDKIWSFNGHLEKVNGEKAEENDPKPKVTKYILMSVKDAYTDFHLDFAGTSVYYNVISGQKKFLLFPPTQSNIDKYIEWSLKEDQNSVFLGDILEDGIAMELDAGDLFMIPAGYIHAVYTPVDSLVFGGNFLTIRDLETHLKIVEIEKLTKVPRRFTFPKFDQVMGKLCEYLALDKNKITSDVSDGDLLSRTTNCAIQSLHAYVIKPEVKYKPLNFTSKKHLAKALADLIS

SEQ ID NO: 2478 - protein, 429 aa, Saccharomyces cerevisiae
MVDVEEKSQEVEYVDPTVNRVPNYEVSEKAFLLTQSKVSIEQRKEAAEFVLAKIKEEEMAPYYKYLCEEYLVNNGQSDLEHDEKSDSLNEWIKFDQELYNELCKKNESKIKELNEKIQKLEEDDEGELEQAQAWINLGEYYAQIGDKDNAEKTLGKSLSKAISTGAKIDVMLTIARLGFFYNDQLYVKEKLEAVNSMIEKGGDWERRNRYKTYYGIHCLAVRNFKEAAKLLVDSLATFTSIELTSYESIATYASVTGLFTLERTDLKSKVIDSPELLSLISTTAALQSISSLTISLYASDYASYFPYLLETYANVLIPCKYLNRHADFFVREMRRKVYAQLLESYKTLSLKSMASAFGVSVAFLDNDLGKFIPNKQLNCVIDRVNGIVETNRPDNKNAQYHLLVKQGDGLLTKLQKYGAAVRLTGSDRV

SEQ ID NO: 2479 - protein, 106 aa, Saccharomyces cerevisiae
MAKSLRASSHLNAKSVKRRGVFQKAVDAREQRISDKLKEDLLKQKLEDLKKKEEQGIDMDVDEKKSNEEAPRKKISTSGWRDGRHHTYKKAKLMKQSKKKTSFTRF

SEQ ID NO: 2480 - protein, 427 aa, Saccharomyces cerevisiae
MAKGFKLKELLSHQKEIEKAEKLENDLKKKKSQELKKEEPTIVTASNLKKLEKKEKKADVKKEVAADTEEYQSQALSKKEKRKLKKELKKMQEQDATEAQKHMSGDEDESGDDREEEEEEEEEEEGRLDLEKLAKSDSESEDDSESENDSEEDEDVVAKEESEEKEEQEEEQDVPLSDVEFDSDADVVPHHKLTVNNTKAMKHALERVQLPWKKHSFQEHQSVTSETNTDEHIKDIYDDTERELAFYKQSLDAVLVARDELKRLKVPFKRPLDYFAEMVKSDEHMDKIKGKLIEEASDKKAREEARRQRQLKKFGKQVQNATLQKRQLEKRETLEKIKSLKNKRKHNEIDHSEFNVGVEEEVEGKRFDRGRPNGKRAAKNAKYGQGGMKRFKRKNDATSSADVSGFSSRKMKGKTNRPGKSRRARRF

SEQ ID NO: 2481 - protein, 2438 aa, Aspergillus terreus
MAHMEPIAIVGTACRFAGSSSSPSKLWELLQNPRDVASEPPADRFNIDAFYDPEGSNPMATNARQGVSCAAPQYGSVGVARNNLANRISYFFDWQGPSMSIDTACSASMVALYEAVSALTRHDCNLAAALGANLMLSPQMFIAASNLQMLSPTSRSRMWDAQADGYARGEGVASVLLKRLSDAVADGDPIECVIRAVGVNHDGRSMGFTMPSSDAQVQLIRSTYAKAGLDPRSAEDRPQYVEAHGTGTLAGDPQEASALHQAFFSSSDEDTVLHVGSIKTVVGHAEGTAGLAGLIKASQCIQHGIIPPNLLFNRLNPALEPYARQLRVPVDVVPWPPLSPGVPRRVSVNSFGFGGTNAHVILESYEPAEGLIKVDCNQNAVLPFVFSAESDFSLGSVLEQYSRYLSRNPDVEVHDLAWTLLERRSALMHRVGFWAPDIAHLKRSIQDELAVRKGGAPSTLICRPHGKTRKHILGVFTGQGAQWAQMGLELITTSNTARGWLDELQQSLDALPEPYRPGFSLFQELAADSATSRLSEALLSQTLCTAMQVIWVKMLWALNIHFDAVVGHSSGEIAAGFAAGFLTAEDAIRIAYLRGVFCSAPGSSGEGAMLAAGLSMDEATALCEDVSSSEGRINVAASNSPESVTVSGDRDAILRAEQLLKDRGIFVRLLRVSTAYHSHHMQACSQPYQDALRGCNIQIQTPMSTTTWYSSVYAGRPMEEGSVTETLGTGEYWAENLVSPVLFSQALSAAMSATNPSLIVEVGPHPALKGPALQTLSGITPAEIPYIGVSVRNNSAIESMATAIGAFWAHLGPQAINPRGYLALFQPNTKPSVVRGLPLYPFDHRQEHGYQTRKANGWLYRRNTPHPLLGSLSEDLGEGELRWNHYLSPRRIRWLDGHRVQGQIVVPATAYIVMALEAALALAVVKEKSLHLIRIDDLIIGQAISFQDERDEVETLFHLPPMLENRDDNTAVGRFRCQMAASGGHIKTCAEGILTVTWGSPQDDVLPCPVFPSPAGLADVTDMEEYYASLRTLGYEYTGVFQGIHSLSRKMGIATGQVYNPALTGFLIHPAVLDTGLQGLLAAAGEGQLTTLHVPTRIDTVSVNPAVCSIDSLSFEAAVTRTGADGIVGDVELYTAANGPGAVFFEGVHVSSLVPPSAADDPSVFWVQHWTPLVLDVNRSESRLSPEWMTVLEGYERRAFLALKDILQEVTPELRATFDWHRESVVSWIEHIMEETRMGQRASCKPEWLGQNLENLGHIWGRPDASIEDRMMYRVYQNLLPFLRGEAKMLDALRQDELLTQFYRDEHELRDVNRRLGQLVGDLAVRFPRMKLLEVGAGTGSATREVLKHVSRAYHSYTFTDISVGFFEDMLETLPEHADRLIFQKLDVGQDPLEQGFTENAYDVIIAANVLHATPALHETLRNVRRLLKPGGYLIALEITNIDAIRIGYLMCAFDGWWLGREDGRPWGPVVSASQWDSLLRETGFGGIDSITDRAADELTMYSVFAAQAVDDQITRIREPLTPLPPQPPFCRGVIIGGSPNLVTGVRAIIHPFFSDVEHVSAIENLTEGAPAVVLMVADLSDTPCFQSLTESRLAGLKALVKMAEKTLWVTMGSEAENPFLCLSKGFLTSMNYEHPNVFQYLNIIDPADVQPVVLSEHLLRLAHTTQNNDFTLTSCVHSTELELRLYPGGILKFPRINASNVLNRRYAAARRPVTSPVTDMQESVVVLGQGPDGKLQLLLGEERLLGDRTGVTINVRYSTNRAVRINGAGYLVLVLGQDKVTKTRLVALAGQSASVISTSCYWEIPADISEEQEAAYLYATATALLAASLIQSNGTTILVHGADAILRHAIAIEAASRVVQPIFTTTSPSAASSTGFGKSILVHQNESRRQLAHLLPRYFTAAVNFDSNDHRLFDRMMAIGHQSGVTQEHLLTTLTAVLPRPSASSLPAHPQAVIDALRKAALTAYQLTVQSTAPGHIATSIADIQSCSQELAVADWTPPCGSVPVHLQPASQLVRLSAQKTYLLVGMTGALGQSITQWLIARGARNIVLTSRNPSVDPAWILEMQSTTGARVLVTSMDVTSRASILAVAHALKAGWPPLGGVVNGAMVLWDQLFVDAPLSVLTGQLAPKVQGSLLLDEIFGQEPGLDFFILFGSAIATIGNLGQSAYTAASNFMVALAARRRARGLVASVLQPAQVAGTMGYLRDKDDSFWARMFDMIGRHLVSEPDLHELFAHAILSGRGPPSDVGFGPGEGECVIGGLSVQDPAVYPNILWFRTPKVWPFIHYHHEGTGPSSAATGSVPLVEQLKCATSLAQVGEVVEAGVAAKLHHRLHLPGEVGSGNVTGDTRLTELGVDSLIAVDLRRWFAQELEVDIPVLQMLSGCSVKELAAAATALLQPKFYPGVVGDSDVGSEKDGSSDSRGDTSSSSYQVITPEESD

SEQ ID NO: 2482 - protein, 288 aa, Saccharomyces cerevisiae
MTSIGTGYDLSNSVFSPDGRNFQVEYAVKAVENGTTSIGIKCNDGVVFAVEKLITSKLLVPQKNVKIQVVDRHIGCVYSGLIPDGRHLVNRGREEAASFKKLYKTPIPIPAFADRLGQYVQAHTLYNSVRPFGVSTIFGGVDKNGAHLYMLEPSGSYWGYKGAATGKGRQSAKAELEKLVDHHPEGLSAREAVKQAAKIIYLAHEDNKEKDFELEISWCSLSETNGLHKFVKGDLLQEAIDFAQKEINGDDDEDEDDSDNVMSSDDENAPVATNANATTDQEGDIHLE

SEQ ID NO: 2483 - protein, 148 aa, Saccharomyces cerevisiae
MSSSKRIAKELSDLERDPPTSCSAGPVGDDLYHWQASIMGPADSPYAGGVFFLSIHFPTDYPFKPPKISFTTKIYHPNINANGNICLDILKDQWSPALTLSKVLLSICSLLTDANPDDPLVPEIAHIYKTDRPKYEATAREWTKKYAV

SEQ ID NO: 2484 - protein, 703 aa, Schizosaccharomyces pombe
MSLSRCPTDNSSSRINSSVPLINSSSPATPPESFDPQVFPSSLIHGDNLLPQDDQIASDPRSESNSCNGNTSSSLPCTDSYQYPLKHSCTPSFLRKFNESIENVSYKCLDHSPPDSVPGDFSISLVPQRNFLYSHSSLPPKIISIDRNNRIKLDNSISSNSDNFPPSPKVDTSNTVSPGSKPISEDLEDLNLQSIVQTFEDLPEGIQSYAFFQLLRSCNRQSMRLLLNECEPLLKKDILSNLPFSIVQSILLNLDIHSFLSCRLVSPTWNRILDVHTSYWKHMFSLFGFQINENDWKYANPNLNRPPFLHNDQISDDYFPEIFKRHFLNRKRWLFPSIPPSHLSFPIHVPNFMITSLLLHKDRIITTSGSGTIQIHNAITGVLEARLEGHKEGVWAVKIHENTLVSGSIDKTVRVWNIEKAKCTHIFRGHISIIRCLEILVPSRLIRHGVEIVEPDQPYIVSGSRDHTLRVWKLPKNTDPPYLPDNTNSIDRWEKNPYFVHTLIGHTDSVRTISGYGDILVSGSYDSSIRIWRVSTGECLYHLRGHSLRIYSVLYEPERNICISGSMDKSIRVWDLSTGTCKYVLEGHDAFVTLLNVFQNRLISGSADSTIRIWDLNTGKPLMVLPSNSGYISSFVSDEHKIISGNDGSVKLWDVRTGKLLRFLLTDLTKIWHVDFDAMRCVAAVQRDDQAYLEVINFSGSRP

SEQ ID NO: 2485 - protein, 386 aa, Saccharomyces cerevisiae
MVNLNTIPPKNGRDYYIALGLEGSANKLGVGIVKHPLLPKHANSDLSYDCEAEMLSNIRDTYVTPPGEGFLPRDTARHHRNWCIRLIKQALAEADIKSPTLDIDVICFTKGPGMGAPLHSVVIAARTCSLLWDVPLVGVNHCIGHIEMGREITKAQNPVVLYVSGGNTQVIAYSEKRYRIFGETLDIAIGNCLDRFARTLKIPNEPSPGYNIEQLAKKAPHKENLVELPYTVKGMDLSMSGILASIDLLAKDLFKGNKKNKILFDKTTGEQKVTVEDLCYSLQENLFAMLVEITERAMAHVNSNQVLIVGGVGCNVRLQEMMAQMCKDRANGQVHATDNRFCIDNGVMIAQAGLLEYRMGGIVKDFSETVVTQKFRTDEVYAAWRD

SEQ ID NO: 2486 - protein, 876 aa, =Saccharomyces cerevisiae [sequence omitted]

SEQ ID NO: 2487 - protein, 425 aa, Schizosaccharomyces pombe
MSLSEYLREFAEIFEEAAQELTSIFELPPDLLKDITEEDVGTDDSCNKKFLEVQKQKEDEEDEEILKGVDLTQQDSVREKIHEIQSMSQLSEKRKALLMQKMLMSGYLKYRRTHKKESDENQLSSSDLEKTYYDKEQEILGCSHYMRNCKVQCFDCHEWYTCRHCHNDACDHVLERPAVENMLCMICSKVQPAAQYCKYCKNCMGRYYCNKCKLWDDDPNKSSYHCDDCGICRIGRGLGDDYFHCKTCGLCLPISVFNTHRCIERSTDCNCPICGEYMFNSRERVIFLSCSHPLHQRCHEEYIRTNYRCPTCYKTIINVNSLFRILDMEIERQPMPYPYNTWISTIRCNDCNSRCDTKYHFLGHKCNSCHSYNTCISSIYKPLDHPQVSIPRLATAEDAGMRRLMGHSWDNSDEDFNIFGIHSFI

SEQ ID NO: 2488 - protein, 792 aa, Saccharomyces cerevisiae
MTTQESIKPLVDRILSNPLQFNAAMISNKSNNNDTSAAPENSSYIVIGKQHNNNSNSTAIAATAESKQIKENNLIDRPNGKKTNTVPKSMAEALLLYTSKNDKDAADATGAKKSAELSTELSTEPPSSSSEDDKVGKEEEEEGEIFHEARDYVEPRKASLKERDNADKGDGEDIGEDIGEDIGEDIGEDIGEDIGENLGSPLATIDDSSNENEKEKRKELSTSISSDDEIEDDEDEDDMDYDSSAMEKELPEEEENDSSSKISEGEKKSLYQDLMENSTVEVNRYEPVNNTKENGNRNPKGEEEEEEEEELKHKSRSITPPVTISNLSNFYQFNENINDRGSLNSTRIVKNWGDKFTNLKPRGLLNHGVTCYTNAAVQAMLHIPSIQHYLFDILMGKYDSTISKNSVSYTLAETSKKMWLPVSKNPRKNVSASYINPKHLISRLDDINCMMSEWQQEDSHEYFMSLMSRLQEDSVPKGHKLIESIIYDIFGGLLKQIVTCKSCGSISKTEQPFYDLSLHLKGKKKLDPNSDLSSDSINGTSATTSTTTSNAATKPSLSSSSSVNLNNGSPFAAASDLSSANRRFSIEKSIKDFFNPELIKVDKEQKGYVCEKCHKTTNAVKHSSILRAPETLLVHLKKFRFNGTSSSKMKQAVSYPMFLDLTEYCESKELPVKYQLLSVVVHEGRSLSSGHYIAHCKQPDGSWATYDDEYINIISERDVLKEPNAYYLLYTRLTPKSVPLPLAKSAMATGNVTSKSKQEQAVNEPNNRPLKINSKKNNRKKWKKNKKRKFTK

SEQ ID NO: 2489 - protein, 229 aa, Aspergillus terreus
MTFYQLSDAEGADNYYNPLLLWWYDFWVHWVSALFAWKCSSKNILLPFFLSNIGSRHCDVGVGTGYYLSAVRKRQPSWPQDKLTLVDFHIRCLRKAANRVGIADRTECVLANILEPIPIQPERQFDSISLMYVLHCLPGASKDKGRVFANLKPLLKDSGTLFGSTLLCRGVRQNWFNWLLQRIYNAVDMFQNRADFPDDFVRALEEEFEEVESVIIGTVLMFKARKPRR

SEQ ID NO: 2490 - protein, 262 aa, Schizosaccharomyces pombe
MSFLELTEVWGKPQKDIFFPSGSEVEESTDAPIQRTVQPIVTGSSVLALKFADGVMIAADNLASYGSLARFYDVERLTKVGDNTIVGAGGDISDYQQIQRLLEKLEIKEGNYGDGYALQPSYIHEYLSKVLYARRNKLDPYWNQLIVAGVDGENKEPYVAFADLRGTTYSAPAIATGFAMHLALPMLRKATDDDRWKTLSKESARATIDECMRVLFYRDARSLNKFSVATITPEGIEFQTDQSVSSKWAFAEKQYGYGTQTV

SEQ ID NO: 2491 - protein, 382 aa, Schizosaccharomyces pombe
MQIFVKTLTGKTITLEVESSDTIDNVKSKIQDKEGIPPDQQRLIFAGKQLEDGRTLSDYNIQKESTLHLVLRLRGGMQIFVKTLTGKTITLEVESSDTIDNVKSKIQDKEGIPPDQQRLIFAGKQLEDGRTLSDYNIQKESTLHLVLRLRGGMQIFVKTLTGKTITLEVESSDTIDNVKSKIQDKEGIPPDQQRLIFAGKQLEDGRTLSDYNIQKESTLHLVLRLRGGMQIFVKTLTGKTITLEVESSDTIDNVKSKIQDKEGIPPDQQRLIFAGKQLEDGRTLSDYNIQKESTLHLVLRLRGGMQIFVKTLTGKTITLEVESSDTIDNVKSKIQDKEGIPPDQQRLIFAGKQLEDGRTLSDYNIQKESTLHLVLRLRGGLF

SEQ ID NO: 2492 - protein, 712 aa, Saccharomyces cerevisiae
MRLLLCKNWFASPVISPLLYTRSLYSMANTTSFPIAPQAPPNWSFTPSDISGKTNEIINNSNNFYDSMSKVESPSVSNFVEPFMKFENELGPIINQLTFLQHVSSDKEIRDASVNSSMKLDELNIDLSLRHDIFLQFARVWQDVQSKADSVERETFKYVEKSYKDYIHSGLELDEGNRLKIKEIKKKISVNSINFSKNLGEQKEYITFTKEQLEGVPDSILTQFETIKSDKDSNETLYKVTFKYPDIFPVMKLASSAQTRKQAFLADQNKVPENEAILLDTLKLRDELASLLGYDTYANYNLYDKMAEDSTTVMNFLNDLKDKLIPLGRKELQVLQDMKAEDVKKLNQGADPNYYIWDHRYYDNKYLLENFNVDLEKISEYFPLEATITGMLEIYETLFNLKFIETKDSQNKSVWHDDVKQIAVWNMDDPKSPNFVGWIYFDLHPRDGKYGHAANFGLSSSFMIDDTTRSYPVTALVCNFSKSTKDKPSLLKHNEIVTFFHELGHGIHDLVGQNKESRFNGPGSVPWDFVEAPSQMLEFWTWNKNELINLSSHYKTGEKIPESLINSLIKTKHVNGALFTLRQLHFGLFDMKVHTCKDLQNLSICDTWNQLRQDISLISNGGTLSKGYDSFGHIMSDSYSAGYYGYLWAEVFATDMYHTKFAKDPLNAKNGIQYRDIVLARGGLYDINDNLKEFLGREPSKDAFLKELGLQN

SEQ ID NO: 2493 - protein, 95 aa, Saccharomyces cerevisiae
MLFFSFFKTLVDQEVVVELKNDIEIKGTLQSVDQFLNLKLDNISCTDEKKYPHLGSVRNIFIRGSTVRYVYLNKNMVDTNLLQDATRREVMTERK

SEQ ID NO: 2494 - protein, 338 aa, Saccharomyces cerevisiae
MNDKLQEEHNEKDTTSQINGFTPPHMSIDFHSNNNSNIIETIGVSKRLGNSVLSELDSRASSKFEFLKDQSEQQYNGDKNNEPKSGSYNINEFFQAKHDSQFGQMESLDTHYTLLHTPKRKSQHAIPQDRSDSMKRSRPSRSIPYTTPVVNDITRRIRRLKLRNSLVNGNDIVARARSMQANSNINSIKNTPLSKPKPFMHKPNFLMPTTNSLNKINSAHRNTSSSSTASSIPRSKVHRSISIRDLHAKTKPVERTPVAQGTNSQLKNSVSVFDRLYKQTTFSRSTSMNNLSSGTSAKSKEHTNVKTRLVKSKTSGSLSSNLKQSTATGTKSDRPIWR

SEQ ID NO: 2495 - protein, 250 aa, Saccharomyces cerevisiae
MAKLVHDVQKKQHRERSQLTSRSRYGFLEKHKDYVKRAQDFHRKQSTLKVLREKAKERNPDEYYHAMHSRKTDAKGLLISSRHGDEEDESLSMDQVKLLKTQDSNYVRTLRQIELKKLEKGAKQLMFKSSGNHTIFVDSREKMNEFTPEKFFNTTSEMVNRSENRLTKDQLAQDISNNRNASSIMPKESLDKKKLKKFKQVKQHLQRETQLKQVQQRMDAQRELLKKGSKKKIVDSSGKISFKWKKQRKR

SEQ ID NO: 2496 - protein, 462 aa, Talaromyces marneffei
MKFLSSLVVLGLSAQALASPYVDHQATKDQRDVNVFKQVLQDINLDVQKFDQDITQYQGGDPTVLLADSDAIIKTTEEGIQRIGPQPPLSVTEALALVGPVQGVNKLIMKAVDHLIEKKGPLVGGGYGPQVKDSLERQAHAASKLSELVSSKVPSPLAPISKQLSDQVAQALQKGIQAFSISARQATKVKREATKVQRDISAFKKVIQNISLAVNKFNVDIERYVGGDASHLLADGNVLIKATLDGVQSLQNEPPLSSMEALALVGPVQDLSNQILLAIQNLIDKKEPLVQAGFGGKVENNLRQQEEAAQKLSELVSTKVPHELADISRQLSDGIAAGIKKGIDAFAGTGPAPTTSSTPEASTAPAPSTPPQTPEDTLVPATSTPAPGPAPTAPDSSMVWPTSTTASPDVQPTITSSGTSVPAAPTGGNSSPAVPAFTGAASANQVSGAVGLAAGLLAVLAF

SEQ ID NO: 2497 - protein, 330 aa, Saccharomyces cerevisiae
MASINLIKSLKLYKEKIWSFDFSQGILATGSTDRKIKLVSVKYDDFTLIDVLDETAHKKAIRSVAWRPHTSLLAAGSFDSTVSIWAKEESADRTFEMDLLAIIEGHENEVKGVAWSNDGYYLATCSRDKSVWIWETDESGEEYECISVLQEHSQDVKHVIWHPSEALLASSSYDDTVRIWKDYDDDWECVAVLNGHEGTVWSSDFDKTEGVFRLCSGSDDSTVRVWKYMGDDEDDQQEWVCEAILPDVHKRQVYNVAWGFNGLIASVGADGVLAVYEEVDGEWKVFAKRALCHGVYEINVVKWLELNGKTILATGGDDGIVNFWSLEKAA

SEQ ID NO: 2498 - protein, 228 aa, Saccharomyces cerevisiae
MSNYPLHQACMENEFFKVQELLHSKPSLLLQKDQDGRIPLHWSVSFQAHEITSFLLSKMENVNLDDYPDDSGWTPFHIACSVGNLEVVKSLYDRPLKPDLNKITNQGVTCLHLAVGKKWFEVSQFLIENGASVRIKDKFNQIPLHRAASVGSLKLIELLCGLGKSAVNWQDKQGWTPLFHALAEGHGDAAVLLVEKYGAEYDLVDNKGAKAEDVALNEQVKKFFLNNV

SEQ ID NO: 2499 - protein, 1619 aa, Saccharomyces cerevisiae
MAAVPTIDLTLADSDNEDIFHSFSSSTSVDKIDIRKENGKLRMAGLEVAQSNDDAARQAFHVFKTNISNNETFDTILSKSKTITDSTFNNEKSSNEVKQQQVLKEETMGSSNDEKKTQESSPSAEMIKLFYENDDVPLSDSFKQKEEGKRINQDEQVKENICGISSSYVSKDYDGVEDDFEPNTCQDSNLDFQEEKLNLNNKPSQQQFSDPETKDNSLKSENKDQIKGVTTTSYRDLPIESSAFQDSETQNNSKNTIPNIVNEKRTPALPSNLSSVESSLKNETAKVEGKTTVRLPGLQNNVALLEQEQSELFKHFSEQPVDISDFGRKIKRKHSGDFADNKILKRPILPSKNMDHTTHNSHDSEQKNSSIIILSDEDESGAGINDIESPLKVSEPNTADALRSSVPEVISLLDLPNIDLNNSVIKEASGSNSIPTSETDAQSSSSSVLQGTIMTEQATQSSQHECNSSLDTLKKNHQKLLKDLNSRESELRNALSCCKTNSEILRRKLSRREKEVSDAEKHWQLLLTSMARGGRTISSTQQILVDEAENQLNKLKEKRQLTKSKLDSINLKMYNYNEQWKSFVHSKNINLQKSLAALERSARDSKASATVNKRNECLAEKEKLDQMLKEGTLSFSTYKQLTGEIQQKLNDLKLGDQRTTDINSVLPIVRQPLAKRDLFIKSIDTAKDLLAKNTSRTEMTKRILYRHLDNLVSYKNFFEDGRSLIDINRRHVAHESAQILFTNGVKMPIVFETLQDYGIKFSNPAIVNPDRRAQYFKSIEVARDLISKSTRSEDAKRKITRFLNIIEEFRKDIDTGFPPTPLKREGVGKAVVGLRQQGLKMDRLYENLRRYKIPITSEELLQQSYLFPVNADQRPPSNWNIVENTEDTSSTANDLSMQDEFHISNMHAAEDQEQIRALLENVKQSESIIDGEALTPEDMTVNLLKHQRLGLHWLLQVENSAKKGGLLADDMGLGKTIQAIALMLANRSEESKCKTNLIVAPVSVLRVWKGELETKVKKRAKFTTFIFGGSGNGKVKHWRDLARYDAVLVSYQTLANEFKKHWPKKLDGEQNQLPAVPHIQALNRLKTSNEYYSPFFCNDSTFYRILLDEGQNIKNKNTRASKACCTINGMYRWVLSGTPIQNSMDELYSLIRFLRIPPYHKEQRFKLDIGRFFQRNKQYQYDNEDRKNALRKVRVLLNAIMLRRSKADKIDGKPLLELPPKIVEVDESRLKGEELKFYTALESKNQALAKKLLNNSTRGSYSSVLTLLLRLRQACCHSELVVMGEKKAEGTKVANGKSFEDDWLRLYYKITHMSGEAQAQVITSMNSMTCFWCMEQLEPEAMSVLTGCGHLICDTCIEPFIEESSMLPQAKKTKGGAFAIPCKDCQRLTNEKDIVSHKLYDQVINQGFTEEDLHAEYLSEMEKQKIQQKNVYVPNFESLEPSTKIEQCIQVIQRVFDESATEKIIIFSQFTTFFEILEHFLKNKLNFPYLKYIGSMNAQRRSDVINEFYRDPEKRILLISMKAGNSGLTLTCANHVVIVDPFWNPYVEEQAQDRCYRISQTKKVQVHKLFIKDSVEDRISELQKRKKEMVDSAMDPGKIKEVNSLGRRELGFLFGLNAL

SEQ ID NO: 2500 - protein, 245 aa, Schizosaccharomyces pombe
MTDKYAFSLTTFSPNGKLVQIEYALNAVNAGVTSVGIKATDGVVLATEKKPTSELAIGASLEKVCAITPDIGMVYSGMGPDFRVLVDKSRKVAQTTYKKIYNEYPPTKILVQEIASVMQESTQSGGVRPFGVSLLVAGMDEKGPSLYQVDPSGTYFAWKATAIGKSSTAAKTFLEKRYNDELELDDAVHTAILALKETFEGELTEDNIEIAVVSTKPTDSGIVGVPGGHFCRLSQSEIRDYLDQV

SEQ ID NO: 2501 - protein, 1610 aa, Schizosaccharomyces pombe
MKKKSTDLYGRKNPGMQSMSGSFSSLQIALDESSSNFSTIYEPPDLSGLDAEMIVIVKNLQKRDIVTKCRALQDLIQWNDPSQFDNEQFLNALAVLFPRLSIEVERHVRLKIFVFMSVLSSALQKKLAPWLKFYITPWVMGFFDSDRAVSVSAKDSFKNLLSEEKWPHVWLKFGSTIAPIVTDVFLHEDKESLTDLRFFSNEEAESKVTRVKSSCLLTLSFLFKQTADLENLETDKKIDKQTFKSSLYENLSTLFKSDEFWSLVSSPQDGVTVSLSDLLLIILKYDKPFVTQYKEKYFKRVSRMISRLTSLTCVPMLRLLSNMISNFPNEVHQFANDSKRPLSKLFSNLITKRISLPNSGFYTSLLNLFKSIGAMQLVPSIESVDELCDAFLETANQEQRFLSTEVYDCLLNFLSFVYTDSSDPQIKDHVRDRLRTIFTRYFKGEFVLRCSTSDFDHCLQSVFDKNSDFASLWNEVLFGFFNDESMDIETIPFDSLSRNLSLTVQTVLYLKNRNFQTGNEVMSILGPCLSFLMKLSTHKNERIACLSASQLITVCHIFSDTTLIKPVKELFQKYLVNDLPSSILKLGPQSPAFTLLRDILLLLKDYADLSEPWENVANQFTVSFDELENIRVLNSLPSLFADGKLRGKISLVKTLVEYYDTAVFAIMQNPGNDWDMIRACIGSKEILVPEETIKNILFTTLEYFLTNDWVDNHLIILCASLHSLKAHLPTIFDENKSLYSLLPVILFSKPEDDGHVAAHFESIFSLLKEKALEDSGFSLKLCSEVQEWSLNKVLNGSINEKLAADKCVLVFNSFGKLPSNFFTFPASFWDAKISSCIPFFSNKLFIDQDFILGFLDLVASEPINVDMTDVGTQFVHIFHASLYTLYYVETTGCDGDALFNLTFAYLLIRIYLQNGIQSIIDVPIRDAGIFVESFECYFKGEVVKFMRDKDALTVLNELLIDDIDGKMPVLFKRFKNLSSAENTTSFSIFAAQGLTDFLIVVSNLLEMDEKHVDVVLGKLGLSSSKSPIFVSSILEGLKPLEVDSEIIQRIRFKAVNDLTGKLHSANEVSKSLLILNAATTQQITEKPLLPITRCRLFLENITNWCSESGIKSLELLPVCCFLRFMYYFLPTVFSLSGSYWNSIFDYIKYAMKMSVVDAPIVKSFELFALRLYNALSKNYEMNSDIKDCIVESNESMNYLLLKRFLFTHESTLRNSVTARMCNQYLVKLLENCPGKVVRSFQYQEFFPSLCNSNDLQMESVCMKFLREKLSHELKELTVYYMVESDYEPDVSLCPELLSLAIDFPGDPFVMVSKMEKYEHALRVYLLVWDLIFYHFEETTYNIKLSIINQLHAMDLLRPLLNTLVEILNLSYDRPINVDKYPKIDYNLMDYSSATDRIRCLAIHIYYQCLRHLSSSVRSYWSEVKNRAFTSTVESFTGYNVSPLLISASLDDVERSIESEDFQSVGDVNVKVNRNTREISFIYNVDEHKLEMAIKIPSVYPLQNVQVEGIERVGVNERQWRSWILASQSILSSQNGSITDALLVLKKNISMHFEGVEECAICYSVLSVERTLPNKRCGTCRHKFHASCLYKWFKSSNSSRCPLCRSSFTFV

SEQ ID NO: 2502 - protein, 194 aa, Saccharomyces cerevisiae
MVTSNVVLVSGEGERFTVDKKIAERSLLLKNYLNDMHDSNLQNNSDSESDSDSETNHKSKDNNNGDDDDEDDDEIVMPVPNVRSSVLQKVIEWAEHHRDSNFPDEDDDDSRKSAPVDSWDREFLKVDQEMLYEIILAANYLNIKPLLDAGCKVVAEMIRGRSPEEIRRTFNIVNDFTPEEEAAIRRENEWAEDR

SEQ ID NO: 2503 - protein, 376 aa, Saccharomyces cerevisiae
MCANIPEFDSFYENENINYNLESFAPLNCDVNSPFLPINNNDINVNAYGDENLTYSNFLLSYNDKLATTTAKNNSINNSNSNNNSNNNKNNNNNHNNNNLLGNDISQMAFLLDYPSTLNEPQFAVNCKDIYRKDISTPSSLVSSLPPAKFSLSLSNSPSPPPPSSSSLKHGEAIISNTSESSDIFADPNSFEKDTMPLTQELTLENLNNQLNYPDFTINAIEQDPAPSSFSSSSSSSESTVSSSRKRKPCHDSYTHSSPSSSESKKISDSRLSAEGLAKVLNLESPEEALKRERFILGIFQNELNYPLGYKTWIRDTTKEYRTKLINQLHERVKVKYPEYNQSILETIIRRGTYYMMQSRLRRERRMKLKERKRTT

SEQ ID NO: 2504 - protein, 146 aa, Coccidioides posadasii; identical to SEQ ID NO: 2387

SEQ ID NO: 2505 - protein, 21 aa, Candida albicans
  misc_feature (14)..(14): Xaa can be any naturally occurring amino acid
DINGGGATLPQALXQITGVIT

SEQ ID NO: 2506 - protein, 254 aa, Saccharomyces cerevisiae
MSGYDRALSIFSPDGHIFQVEYALEAVKRGTCAVGVKGKNCVVLGCERRSTLKLQDTRITPSKVSKIDSHVVLSFSGLNADSRILIEKARVEAQSHRLTLEDPVTVEYLTRYVAGVQQRYTQSGGVRPFGVSTLIAGFDPRDDEPKLYQTEPSGIYSSWSAQTIGRNSKTVREFLEKNYDRKEPPATVEECVKLTVRSLLEVVQTGAKNIEITVVKPDSDIVALSSEEINQYVTQIEQEKQEQQEQDKKKKSNH

SEQ ID NO: 2507 - protein, 444 aa, Schizosaccharomyces pombe
MPSSDVCKAGSHRHSGWIQSLKKPGPFNLDAPENPEETLKSAFSSKILIIGAGGLGCEILKDLALSGFRDLSVIDMDTIDITNLNRQFLFNESNIDEPKANVAASMIMKRIPSTVVTPFYGKIQDKTIEFYKEFKLIICGLDSVEARRWINSTLVAIAKTGDLIPLVDGGSEGLKGQARVIIPTITSCYECSLDMLTPKISYPICTLANTPRLPEHCVEWAYLLEWPRVFLNASVDSFSKQEVFEPLDGKNSNFEPDNIRHIDWLVKRSIERANKFQIPSSSINRFFVQGIVKRIIPAVASTNAIIAASCCNEALKILTESNPFLDNYMMYVGEDGAYTYTFNLEKRSDCPVCGVLSEVYDISASSTVTLKDILNHYSKSYNLQNPSVSTAAGTPLYLASPPALQVATSKNLSQPILSITSVDVNLVITDKNLSTSLSVQLREC

SEQ ID NO: 2508 - protein, 248 aa, Schizosaccharomyces pombe
MSRSYDSRTTIFSPEGRLYQVEYALEAINHAGVALGIVAKDGIVLAAEKKVTSKLLEQEESAEKLYHIGDNMLCAVAGLTADANILINYARRVGQQYLQTFNEEMPCEQLVRRVCDLKQGYTQYGGLRPFGVSFLYAGWDHIRGYQLFQSNPSGNYGSWQANSIGGNSTSVQSLMRQEYKDDINLDEASAMAVKFLSKTLDSNSLTHEKIEFATITKDTTKNKMVCKIWKSDEINEVLNKYQETQRQS

SEQ ID NO: 2509 - protein, 1562 aa, Saccharomyces cerevisiae
MSFGGINTFQQYNTDLGLGHNGVRISLNYFDGLPDPSLLNSLYSNELKLIFKSLLKRDETTKEKALMDLSNLISDFNQNEYFFNDIFLLCWSQIYAKLIISDYKVIRLQSHQITIMLVKSLRKKISKFLKDFIPLILLGTCELDYSVSKPSLNELTECFNKDPAKINALWAVFQEQLLNLVKEIVVNENEDTISDERYSSKEESEFRYHRVIASAVLLLIKLFVHNKDVSERNSSSLKVILSDESIWKLLNLKNGQNTNAYETVLRLIDVLYTRGYMPSHKNIMKLAVKKLLKSLTHITSKNILKVCPVLPSILNLLATLDDYEDGTIWSYDKSSKEKVLKFLSVSRTSPSPGFFNAVFALYSSTKRHSFLDYYLEWLPFWQKSVQRLNEKGFSARNSAEVLNEFWTNFLKFAEDSSEERVKKMVESEIFNSLSCGKSLSEYTKLNQTLSGVFPPDKWEREIEDYFTSDEDIRKIKVSFEKNLFALLVTSPNNESAISRLFDFFVQLIETDPSNVFNKYDGVYDALNYFLDSDMIFLNGKIGKFINEIPTLVQESTYQNFAGIMAQYSNSKFFKMNTDAITSLEDFFIVALSFNLPKTIILATMNELDNDIYQQLMKSDSLELELYIEDFMKNYKFDDSGEIFKGNNKFLNQRTITTLYRSAVANGQVEQFCAVLSKLDETFFSTLLLNTDFLSCALYEVSEDTNEKLFKLSLQLAKGNSEIANKLAQVILQHAQVYFSPGAKEKYVTHAVELINGCNDTSQIFFPANAIEVFARYMPAIDYRSSLVSSLSTNTHLLLTDDKPINLKNMQKLIRYALFLDALLDALPERVNNHIVAFITVVSELVTDYNCLSEEPNDLYYDFGHTFFKHGKVNLNFSDIVGNVIQPANGGDAMLTFDIAESNSVYFFYYSRVLYKVLLNSIDTVSSTTLNGLLASVESFVTKTVRDQKSTDKDYLLCAILLLMFNRSNSKDEITKLRTLLASQLIGIREVELVDQEFKSLALLNNLLDIPQADKQFVPIAPQRLNMIFRSILKWLDSDLAYEPSFSTVRLLLLDFFTKLMRFEGVRDMGITAFELSERLLADSLSMCQIDDTLYLLELRSSCLNLYETLSQGVSKNGEEISEYGDEIQENLIELMFLNFNQERNNQVSTLFYQKLYKVISSMELKKLESQYKRIFEVVLNDKDIGSNINQSRLLTTLLGSLVVKTQQDIIIEYELRIQKQTGSDVDGSASDNDVNSKFKLPQKLLQKVTDEVPKEYLEYENKNSFIKYLWYWHLILMYFKDTSYNMRQIFIEQLKEAGLINRMFDFITDQIDLRDTEFWKQVDTKEISEYNIVGNNFSPYKEDIFEECKKLLGHTLYQLFNNVGCLTSIWWLNIKDRTLQNDIEKFVSEFISPILIKNEFDDINSKMDRLTSNDDALTIKLNNITNEVKASYLIDDQKLEISFKLPKNYPLTNIQVNGVSRVGISEQKWKQWIMSTQHVITGMNGSVLDSLELFTKNVHLQFSGFEECAICYSILHAVDRKLPSKTCPTCKNKFHGACLYKWFRSSGNNTCPLCRSEIPFRR

SEQ ID NO: 2510 - protein, 161 aa, Schizosaccharomyces pombe
MSKIKLISSDNEEFVVDQLIAERSMLIKNMLEDVGEINVPIPLPNVSSNVLRKVLEWCEHHKNDLYSGTEEESDIRLKKSTDIDEWDRKFMAVDQEMLFEIVLASNYLDIKPLLDTGCKTVANMIRGKSPEDIRKTFNIPNDFTPEEEEQIRKENEWAEDR

SEQ ID NO: 2511 - protein, 482 aa, Schizosaccharomyces pombe
MSGVIYYKFKSQKDPSRITFDGTIGMSVFDVKREIIMQKKLGNGLDFDLLLYNANSNEEYDDDTFIIPRSTSVIVRRVPAQKSGKGTAARYVSGAPKTTGARSDSVKRPVPMLQKKAPITSGESNINKSPSSSEDAAIQQMFQVSSDQWRETQDKMASATPIYKPNQRRIAASVPDKPPPPGYICYRCGQKGHWIQACPTNADPNYDGKPRVKRTTGIPRSFLKNVERPAEGDAANIMINAEGDYVVVQPDVASWETYQSRKAALTANDVYKMQPPNISLACTLCKKLARNACRTPCCDKLFCEECIQTALLDSDFECPNCHRKDVLLDTLNPDYQKQREIEAVVKSVLGSNSKNSDKVGTSDDNNTPMSEKRKREDDDANGPNKFAARSSAVFSKATAEPAFKSAMAIPDMPSMPHVQGFPAPFPPFMMPGLPQMPPMMMNAIAGQVYHNNRNPPRTNSRPSNASVPPPSSLHKNPPTKTN

SEQ ID NO: 2512 - protein, 815 aa, Saccharomyces cerevisiae
MSETLPRSDDLEATWNFIEPGINQILGNEKNQASTSKRVYKILSPTMYMEVYTAIYNYCVNKSRSSGHFSTDSRTGQSTILVGSEIYEKLKNYLKNYILNFKQSNSETFLQFYVKRWKRFTIGAIFLNHAFDYMNRYWVQKERSDGKRHIFDVNTLCLMTWKEVMFDPSKDVLINELLDQVTLGREGQIIQRSNISTAIKSLVALGIDPQDLKKLNLNVYIQVFEKPFLKKTQEYYTQYTNDYLEKHSVTEYIFEAHEIIKREEKAMTIYWDDHTKKPLSMALNKVLITDHIEKLENEFVVLLDARDIEKITSLYALIRRDFTLIPRMASVFENYVKKTGENEISSLLAMHKHNIMKNENANPKKLALMTAHSLSPKDYIKKLLEVHDIFSKIFNESFPDDIPLAKALDNACGAFININEFALPAGSPKSATSKTSEMLAKYSDILLKKATKPEVASDMSDEDIITIFKYLTDKDAFETHYRRLFAKRLIHGTSTSAEDEENIIQRLQAANSMEYTGKITKMFQDIRLSKILEDDFAVALKNEPDYSKAKYPDLQPFVLAENMWPFSYQEVEFKLPKELVPSHEKLKESYSQKHNGRILKWLWPLCRGELKADIGKPGRMPFNFTVTLFQMAILLLYNDADVLTLENIQEGTSLTIQHIAAAMVPFIKFKLIQQVPPGLDALVKPETQFKLSRPYKALKTNINFASGVKNDILQSLSGGGHDNHGNKLGNKRLTEDERIEKELNTERQIFLEACIVRIMKAKRNLPHTTLVNECIAQSHQRFNAKVSMVKRAIDSLIQKGYLQRGDDGESYAYLA

SEQ ID NO: 2513 - protein, 99 aa, Saccharomyces cerevisiae
MSQDFVTLVSKDDKEYEISRSAAMISPTLKAMIEGPFRESKGRIELKQFDSHILEKAVEYLNYNLKYSGVSEDDDEIPEFEIPTEMSLELLLAADYLSI

SEQ ID NO: 2514 - protein, 226 aa, Schizosaccharomyces pombe
MATTVKDTMNVDINAIKKGEIRMGTTITALRYKDGVILAADSRTTMGAYIANRVTDKLTQLTDNIWCCRSGSAADTQTVADLLKYYLSMYRIQFGHDPSVHTAATLASEMCYQNKNMLSAGLIVAGYDEKTGGDVYSIPLGGSLHKQPLAIGGSGSAFIYGFCDANFRENMTQEEAVEFLKNAVALAMERDGSSGGTIRMVILNKDGMERKFFAIDTANPIPVFTH

SEQ ID NO: 2515 - protein, 151 aa, Schizosaccharomyces pombe
MSTTARRRLMRDFKRMQQDPPAGVSASPVSDNVMLWNAVIIGPADTPFEDGTFKLVLSFDEQYPNKPPLVKFVSTMFHPNVYANGELCLDILQNRWSPTYDVAAILTSIQSLLNDPNNASPANAEAAQLHRENKKEYVRRVRKTVEDSWES

SEQ ID NO: 2516 - protein, 213 aa, Schizosaccharomyces pombe
MDEFKQLDLKKREIENRLNELEGVLLKERVTMDTPLLTEDGFPRSDIDVPSIRTARHEIITLRNDHRELEDQIKKVLEKVFSGFSKESLAANDETKLAQEADPLNFNAANYNMNDIISRSKILGRVKPFCVVDSVAVESPAQEAGLCIGDELVHVQNVTSLSELPTFISNNVNKTLDVLLIRGYSADGSTNLVELKLTPHKWQGPGLLGCHLR

SEQ ID NO: 2517 - protein, 441 aa, Saccharomyces cerevisiae
MSSTIFYRFKSQRNTSRILFDGTGLTVFDLKREIIQENKLGDGTDFQLKIYNPDTEEEYDDDAFVIPRSTSVIVKRSPAIKSFSVHSRLKGNVGAAALGNATRYVTGRPRVLQKRQHTATTTANVSGTTEEERIASMFATQENQWEQTQEEMSAATPVFFKSQTNKNSAQENEGPPPPGYMCYRCGGRDHWIKNCPTNSDPNFEGKRIRRTTGIPKKFLKSIEIDPETMTPEEMAQRKIMITDEGKFVVQVEDKQSWEDYQRKRENRQIDGDETIWRKGHFKDLPDDLKCPLTGGLLRQPVKTSKCCNIDFSKEALENALVESDFVCPNCETRDILLDSLVPDQDKEKEVETFLKKQEELHGSSKDGNQPETKKMKLMDPTGTAGLNNNTSLPTSVNNGGTPVPPVPLPFGIPPFPMFPMPFMPPTATITNPHQADASPKK

SEQ ID NO: 2518 - protein, 926 aa, Saccharomyces cerevisiae
MSHHKKRVYPQAQLQYGQNATPLQQPAQFMPPQDPAAAGMSYGQMGMPPQGAVPSMGQQQFLTPAQEQLHQQIDQATTSMNDMHLHNVPLVDPNAYMQPQVPVQMGTPLQQQQQPMAAPAYGQPSAAMGQNMRPMNQLYPIDLLTELPPPITDLTLPPPPLVIPPERMLVPSELSNASPDYIRSTLNAVPKNSSLLKKSKLPFGLVIRPYQHLYDDIDPPPLNEDGLIVRCRRCRSYMNPFVTFIEQGRRWRCNFCRLANDVPMQMDQSDPNDPKSRYDRNEIKCAVMEYMAPKEYTLRQPPPATYCFLIDVSQSSIKSGLLATTINTLLQNLDSIPNHDERTRISILCVDNAIHYFKIPLDSENNEESADQINMMDIADLEEPFLPRPNSMVVSLKACRQNIETLLTKIPQIFQSNLITNFALGPALKSAYHLIGGVGGKIIVVSGTLPNLGIGKLQRRNESGVVNTSKETAQLLSCQDSFYKNFTIDCSKVQITVDLFLASEDYMDVASLSNLSRFTAGQTHFYPGFSGKNPNDIVKFSTEFAKHISMDFCMETVMRARGSTGLRMSRFYGHFFNRSSDLCAFSTMPRDQSYLFEVNVDESIMADYCYVQVAVLLSLNNSQRRIRIITLAMPTTESLAEVYASADQLAIASFYNSKAVEKALNSSLDDARVLINKSVQDILATYKKEIVVSNTAGGAPLRLCANLRMFPLLMHSLTKHMAFRSGIVPSDHRASALNNLESLPLKYLIKNIYPDVYSLHDMADEAGLPVQTEDGEATGTIVLPQPINATSSLFERYGLYLIDNGNELFLWMGGDAVPALVFDVFGTQDIFDIPIGKQEIPVVENSEFNQRVRNIINQLRNHDDVITYQSLYIVRGASLSEPVNHASAREVATLRLWASSTLVEDKILNNESYREFLQIMKARISK

SEQ ID NO: 2519 - protein, 234 aa, Schizosaccharomyces pombe
MVYASLGKAIEENCPEEYVEQAIQNDPNSLNAVDDDKRTPLHWACSVGKVNTIYFLLKQPNIKPDEKDEAGWTPLMISINNRSVPDNVIEELINRSDVDPTITTRGGQTCLHYAAGKGRLSIVQLLCDKAPELIRKKDLQGQTPLHRAAAVGKIQVVKYLISQRAPLNTSDSYGFTPLHFALAEGHPDVGVELVRAGADTLRKDSENHTALEVCPDRIVCNEFLEACKEQNLEI

SEQ ID NO: 2520 - protein, 684 aa, Saccharomyces cerevisiae
MARRKNFKKGNKKTFGARDDSRAQKNWSELVKENEKWEKYYKTLALFPEDQWEEFKKTCQAPLPLTFRITGSRKHAGEVLNLFKERHLPNLTNVEFEGEKIKAPVELPWYPDHLAWQLDVPKTVIRKNEQFAKTQRFLVVENAVGNISRQEAVSMIPPIVLEVKPHHTVLDMCAAPGSKTAQLIEALHKDTDEPSGFVVANDADARRSHMLVHQLKRLNSANLMVVNHDAQFFPRIRLHGNSNNKNDVLKFDRILCDVPCSGDGTMRKNVNVWKDWNTQAGLGLHAVQLNILNRGLHLLKNNGRLVYSTCSLNPIENEAVVAEALRKWGDKIRLVNCDDKLPGLIRSKGVSKWPVYDRNLTEKTKGDEGTLDSFFSPSEEEASKFNLQNCMRVYPHQQNTGGFFITVFEKVEDSTEAATEKLSSETPALESEGPQTKKIKVEEVQKKERLPRDANEEPFVFVDPQHEALKVCWDFYGIDNIFDRNTCLVRNATGEPTRVVYTVCPALKDVIQANDDRLKIIYSGVKLFVSQRSDIECSWRIQSESLPIMKHHMKSNRIVEANLEMLKHLLIESFPNFDDIRSKNIDNDFVEKMTKLSSGCAFIDVSRNDPAKENLFLPVWKGNKCINLMVCKEDTHELLYRIFGIDANAKATPSAEEKEKEKETTESPAETTTGTSTEAPSAAN

SEQ ID NO: 2521 - protein, 143 aa, Boletus edulis
MTYSITLRVFQRNPGRGFFSIVEKTVFHYANGGTWSEAKGTHTLTMGGSGTSGVLRFMSDKGELITVAVGVHNYKRWCDVVTGLKPEETALVINPQYYNNGPRAYTREKQLAEYNVTSVVGTRFEVKYTVVEGNNLEANVIFS

SEQ ID NO: 2522 - protein, 261 aa, Saccharomyces cerevisiae
MAGLSFDNYQRNNFLAENSHTQPKATSTGTTIVGVKFNNGVVIAADTRSTQGPIVADKNCAKLHRISPKIWCAGAGTAADTEAVTQLIGSNIELHSLYTSREPRVVSALQMLKQHLFKYQGHIGAYLIVAGVDPTGSHLFSIHAHGSTDVGYYLSLGSGSLAAMAVLESHWKQDLTKEEAIKLASDAIQAGIWNDLGSGSNVDVCVMEIGKDAEYLRNYLTPNVREEKQKSYKFPRGTTAVLKESIVNICDIQEEQVDITA

SEQ ID NO: 2523 - protein, 440 aa, Saccharomyces cerevisiae
MNDYHLEDTTSELEALRLENAQLREQLAKREDSSRDYPLSLEEYQRYGRQMIVEETGGVAGQVKLKNTKVLVVGAGGLGCPALPYLAGAGVGQIGIVDNDVVETSNLHRQVLHDSSRVGMLKCESARQYITKLNPHINVVTYPVRLNSSNAFDIFKGYNYILDCTDSPLTRYLVSDVAVNLGITVVSASGLGTEGQLTILNFNNIGPCYRCFYPTPPPPNAVTSCQEGGVIGPCIGLVGTMMAVETLKLILGIYTNENFSPFLMLYSGFPQQSLRTFKMRGRQEKCLCCGKNRTITKEAIEKGEINYELFCGARNYNVCEPDERISVDAFQRIYKDDEFLAKHIFLDVRPSHHYEISHFPEAVNIPIKNLRDMNGDLKKLQEKLPSVEKDSNIVILCRYGNDSQLATRLLKDKFGFSNVRDVRGGYFKYIDDIDQTIPKY

SEQ ID NO: 2524 - protein, 220 aa, Saccharomyces cerevisiae
MEEEELSKLLANVKIDPSLTSRISQIDSFKLSELMVLKTDIETQLEAYFSVLEQQGIGMDSALVTPDGYPRSDVDVLQVTMIRKNVNMLKNDLNHLLQRSHVLLNQHFDNMNVKSNQDARRNNDDQAIQYTIPFAFISEVVPGSPSDKADIKVDDKLISIGNVHAANHSKLQNIQMVVMKNEDRPLPVLLLREGQILKTSLTPSRNWNGRGLLGCRIQEL

SEQ ID NO: 2525 - protein, 276 aa, Coccidioides posadasii
MRVSVPVLALAFGSLAAAAPNAGRRTCGSVPPPEFFEASEKVAALEESGAFADLQAPIEVETYFHVVASSRSERDGYISDQMLSDQIRVMNEDYAPHGVHFNLRETTRTINPSWASDGNEIAMKRSLRKGGYAALNVYFLKDLGGALGYCYFPTNAAPGSTTFIRDGCSVLSSSVPGGSGAPYDLGKTATHEVGHWMGLFHTFQGGCSGQGDYVSDTPPQRSPSSGCPVGRDSCPGGGVDPIHNYMDYSVDSCMNQFTRGQGTRMSSMWRQFRAGK

SEQ ID NO: 2526 - protein, 945 aa, Saccharomyces cerevisiae
MSLTTAAPLLALLRENQDSVKTYALESINNVVDQLWSEISNELPDIEALYDDDTFSDREMAALIASKVYYNLGEYESAVKYALAAKDRFDIDEKSQFVETIVSKSIEMYVQEASKQYTKDEQFYTKDIIDPKLTSIFERMIEKCLKASELKLALGIALEGYRLDIIESALKSKLDQDSTSENVKIINYLLTLAITTVTNSKFRSSILRKSFDFLMNMPNCDYLTLNKVVVNLNDAGLALQLFKKLKEENDEGLSAQIAFDLVSSASQQLLEILVTELTAQGYDPALLNILSGLPTCDYYNTFLLNNKNIDIGLLNKSKSSLDGKFSLFHTAVSVANGFMHAGTTDNSFIKANLPWLGKAQNWAKFTATASLGVIHKGNLLEGKKVMAPYLPGSRASSRFIKGGSLYGLGLIYAGFGRDTTDYLKNIIVENSGTSGDEDVDVLLHGASLGIGLAAMGSANIEVYEALKEVLYNDSATSGEAAALGMGLCMLGTGKPEAIHDMFTYSQETQHGNITRGLAVGLALINYGRQELADDLITKMLASDESLLRYGGAFTIALAYAGTGNNSAVKRLLHVAVSDSNDDVRRAAVIALGFVLLRDYTTVPRIVQLLSKSHNAHVRCGTAFALGIACAGKGLQSAIDVLDPLTKDPVDFVRQAAMIALSMILIQQTEKLNPQVADINKNFLSVITNKHQEGLAKFGACVAQGIMNAGGRNVTIQLENADTGTLDTKSVVGLVMFSQFWYWFPLAHFLSLSFTPTTVIGIRGSDQAIPKFQMNCYAKEDAFSYPRMYEEASGKEVEKVATAVLSTTARAKARAKKTKKEKGPNEEEKKKEHEEKEKERETNKKGIKETKENDEEFYKNKYSSKPYKVDNMTRILPQQSRYISFIKDDRFVPVRKFKGNNGVVVLRDREPKEPVALIETVRQMKDVNAPLPTPFKVDDNVDFPSA

SEQ ID NO: 2527 - protein, 177 aa, Schizosaccharomyces pombe
MRKIWELKKKEAQKEKNASGISPAQIRIQKDVTDLEIPSTMSTSWPDPIKLNVLHLEIRPDEGYYKGGKFKFRIQIDDNYPHDPPKVKCLNKIYHPNIDIEGNVCLNILRQDWNPVLNLNSILVGLQFLFLSPNAEDPLNKEAAADLHKDPQGFASRVRTAMKGGLVNGISFDNVMA

SEQ ID NO: 2528 - protein, 107 aa, Schizosaccharomyces pombe
MEDEMQIDKKEVEIEQKPPRFEIKKWNAVALWQWDIVVDNCAICRNHIMDLCIECQANTDSAAAQECTVAWGTCNHAFHFHCISRWLNTRNVCPLDNREWEFQRYGH

SEQ ID NO: 2529 - protein, 308 aa, Candida albicans
MQIKFLTTLATVLTSVAAMGDLAFNLGVKNDDGTCKDVSTFEGDLDFLKSHSKIIKTYAVSDCNTLQNLGPAAEAEGFQIQLGIWPNDDAHFEAEKEALQNYLPKISVSTIKIFLVGSEALYREDLTASELASKINEIKDLVKGIKDKNGKSYSSVPVGTVDSWNVLVDGASKPAIDAADVVYSNSFSYWQKNSQANASYSLFDDVMQALQTLQTAKGSTDIEFWVGETGWPTDGSSYGDSVPSVENAADQWQKGICALRAWGINVAVYEAFDEAWKPDTSGTSSVEKHWGVWQSDKTLKYSIDCKFN

SEQ ID NO: 2530 - protein, 405 aa, Saccharomyces cerevisiae
MTAAVTSSNIVLETHESGIKPYFEQKIQETELKIRSKTENVRRLEAQRNALNDKVRFIKDELRLLQEPGSYVGEVIKIVSDKKVLVKVQPEGKYIVDVAKDINVKDLKASQRVCLRSDSYMLHKVLENKADPLVSLMMVEKVPDSTYDMVGGLTKQIKEIKEVIELPVKHPELFESLGIAQPKGVILYGPPGTGKTLLARAVAHHTDCKFIRVSGAELVQKYIGEGSRMVRELFVMAREHAPSIIFMDEIDSIGSTRVEGSGGGDSEVQRTMLELLNQLDGFETSKNIKIIMATNRLDILDPALLRPGRIDRKIEFPPPSVAARAEILRIHSRKMNLTRGINLRKVAEKMNGCSGADVKGVCTEAGMYALRERRIHVTQEDFELAVGKVMNKNQETAISVAKLFK

SEQ ID NO: 2531 - protein, 381 aa, Saccharomyces cerevisiae
MQIFVKTLTGKTITLEVESSDTIDNVKSKIQDKEGIPPDQQRLIFAGKQLEDGRTLSDYNIQKESTLHLVLRLRGGMQIFVKTLTGKTITLEVESSDTIDNVKSKIQDKEGIPPDQQRLIFAGKQLEDGRTLSDYNIQKESTLHLVLRLRGGMQIFVKTLTGKTITLEVESSDTIDNVKSKIQDKEGIPPDQQRLIFAGKQLEDGRTLSDYNIQKESTLHLVLRLRGGMQIFVKTLTGKTITLEVESSDTIDNVKSKIQDKEGIPPDQQRLIFAGKQLEDGRTLSDYNIQKESTLHLVLRLRGGMQIFVKTLTGKTITLEVESSDTIDNVKSKIQDKEGIPPDQQRLIFAGKQLEDGRTLSDYNIQKESTLHLVLRLRGGN

SEQ ID NO: 2532 - protein, 767 aa, Schizosaccharomyces pombe
MSNSAQSRRIRVTIVAADGLYKRDVFRFPDPFAVLTVDGEQTHTTTAIKKTLNPYWNETFEVNVTDNSTIAIQVFDQKKFKKKGQGFLGVINLRVGDVLDLAIGGDEMLTRDLKKSNENTVVHGKIIINLSTTAQSTLQVPSSAASGARTQRTSITNDPQSSQSSSVSRNPASSRAGSPTRDNAPAASPASSEPRTFSSFEDQYGRLPPGWERRTDNLGRTYYVDHNTRSTTWIRPNLSSVAGAAAAELHSSASSANVTEGVQPSSSNAARRTEASVLTSNATTAGSGELPPGWEQRYTPEGRPYFVDHNTRTTTWVDPRRQQYIRSYGGPNNATIQQQPVSQLGPLPSGWEMRLTNTARVYFVDHNTKTTTWDDPRLPSSLDQNVPQYKRDFRRKLIYFLSQPALHPLPGQCHIKVRRNHIFEDSYAEIMRQSATDLKKRLMIKFDGEDGLDYGGLSREYFFLLSHEMFNPFYCLFEYSSVDNYTLQINPHSGINPEHLNYFKFIGRVIGLAIFHRRFVDAFFVVSFYKMILQKKVTLQDMESMDAEYYRSLVWILDNDITGVLDLTFSVEDNCFGEVVTIDLKPNGRNIEVTEENKREYVDLVTVWRIQKRIEEQFNAFHEGFSELIPQELINVFDERELELLIGGISEIDMEDWKKHTDYRSYSENDQIIKWFWELMDEWSNEKKSRLLQFTTGTSRIPVNGFKDLQGSDGPRKFTIEKAGEPNKLPKAHTCFNRLDLPPYTSKKDLDHKLSIAVEETIGFGQE

SEQ ID NO: 2533 - protein, 137 aa, Saccharomyces cerevisiae
MSKVPRNFRLLEELEKGEKGFGPESCSYGLADSDDITMTKWNGTILGPPHSNHENRIYSLSIDCGPNYPDSPPKVTFISKINLPCVNPTTGEVQTDFHTLRDWKRAYTMETLLLDLRKEMATPANKKLRQPKEGETF

SEQ ID NO: 2534 - protein, 445 aa, Saccharomyces cerevisiae
MSRDAPIKADKDYSQILKEEFPKIDSLAQNDCNSALDQLLVLEKKTRQASDLASSKEVLAKIVDLLASRNKWDDLNEQLTLLSKKHGQLKLSIQYMIQKVMEYLKSSKSLDLNTRISVIETIRVVTENKIFVEVERARVTKDLVEIKKEEGKIDEAADILCELQVETYGSMEMSEKIQFILEQMELSILKGDYSQATVLSRKILKKTFKNPKYESLKLEYYNLLVKISLHKREYLEVAQYLQEIYQTDAIKSDEAKWKPVLSHIVYFLVLSPYGNLQNDLIHKIQNDNNLKKLESQESLVKLFTTNELMRWPIVQKTYEPVLNEDDLAFGGEANKHHWEDLQKRVIEHNLRVISEYYSRITLLRLNELLDLTESQTETYISDLVNQGIIYAKVNRPAKIVNFEKPKNSSQLLNEWSHNVDELLEHIETIGHLITKEEIMHGLQAK

SEQ ID NO: 2535 - protein, 148 aa, Schizosaccharomyces pombe
MALPKRIIKEIETLTRDPPPGIVAAPTEDNLRYFKITMEGPQQSAYEGGKFHLELFLPDEYPMMPPNVRFLTKIYHPNVDKLGRICLSTLKKDWSPALQIRTVLLSIQALMGAPNPDDPLDNDVAKIWKENEPQAIANAREWTKKYAV

SEQ ID NO: 2536 - protein, 861 aa, Saccharomyces cerevisiae
MVNISDFFGKNKKSVRSSTSRPTRQVGSSKPEVIDLDTESDQESTNKTPKKMPVSNVIDVSETPEGEKKLPLPAKRKASSPTVKPASSKKTKPSSKSSDSASNITAQDVLDKIPSLDLSNVHVKENAKFDFKSANSNADPDEIVSEIGSFPEGKPNCLLGLTIVFTGVLPTLERGASEALAKRYGARVTKSISSKTSVVVLGDEAGPKKLEKIKQLKIKAIDEEGFKQLIAGMPAEGGDGEAAEKARRKLEEQHNIATKEAELLVKKEEERSKKLAATRVSGGHLERDNVVREEDKLWTVKYAPTNLQQVCGNKGSVMKLKNWLANWENSKKNSFKHAGKDGSGVFRAAMLYGPPGIGKTTAAHLVAQELGYDILEQNASDVRSKTLLNAGVKNALDNMSVVGYFKHNEEAQNLNGKHFVIIMDEVDGMSGGDRGGVGQLAQFCRKTSTPLILICNERNLPKMRPFDRVCLDIQFRRPDANSIKSRLMTIAIREKFKLDPNVIDRLIQTTRGDIRQVINLLSTISTTTKTINHENINEISKAWEKNIALKPFDIAHKMLDGQIYSDIGSRNFTLNDKIALYFDDFDFTPLMIQENYLSTRPSVLKPGQSHLEAVAEAANCISLGDIVEKKIRSSEQLWSLLPLHAVLSSVYPASKVAGHMAGRINFTAWLGQNSKSAKYYRLLQEIHYHTRLGTSTDKIGLRLDYLPTFRKRLLDPFLKQGADAISSVIEVMDDYYLTKEDWDSIMEFFVGPDVTTAIIKKIPATVKSGFTRKYNSMTHPVAIYRTGSTIGGGGVGTSTSTPDFEDVVDADDNPVPADDEETQDSSTDLKKDKLIKQKAKPTKRKTATSKPGGSKKRKTKA

SEQ ID NO: 2537 - protein, 649 aa, Schizosaccharomyces pombe
MFVGKALQFQSFHSSIDATFWHQLSNYKVEKQKLDASPLTIHGKFNTYSRGNISIVFGEAPSNSNIKDCLAEGTLLNANTPQEFTNADVKKIREEIGEVLLNSIKNGVVSERPNELLRFLIFSYADIKAYKYHYWCLFPSFKETPHWIVKDLSPAESLIPSGPILSQIREFLSTADYYQRPFFLLIKSTLDEWTIAPLKELSHCVDKSLQFYLVAEDSVQLAEYPSWPVRNILAFAFIKFKLKVINLFLYRDGINSDTLSKSILIKVEADKDMILEAPLSIVGWERNGKGVLGPRVVNLSTVLDPFVLSESASTLNLSLMRWRLVPQLDLDRIQNSKCLLLGAGTLGCGVARNLLSWGVRHVTFVDYSTVSYSNPVRQSLFTFEDCKRKLPKAECAAQRLKEIYPNMFSTGYNISIPMLGHPIYEAGIEKTMHDYETLENLISTHDAIFLLTDTRESRWLPTVISTAMDKLLINSALGFDSWLVMRHGSVLQKENRLGCYFCNDIFAPSNSLVDRTLDQTCTVTRSGCANIATAIAVELFVSLLQHPNGHAAPVLNEDQTVLGELPHQIRGFLHNFSLMKISGMAYPQCSACSECIINEWNREKWMFVLRAINEPDYVEELCGLREVQALGEIAGTMEEWISDKESVIL

SEQ ID NO: 2538 - protein, 234 aa, Saccharomyces cerevisiae
MFRNNYDGDTVTFSPTGRLFQVEYALEAIKQGSVTVGLRSNTHAVLVALKRNADELSSYQKKIIKCDEHMGLSLAGLAPDARVLSNYLRQQCNYSSLVFNRKLAVERAGHLLCDKAQKNTQSYGGRPYGVGLLIIGYDKSGAHLLEFQPSGNVTELYGTAIGARSQGAKTYLERTLDTFIKIDGNPDELIKAGVEAISQSLRDESLTVDNLSIAIVGKDTPFTIYDGEAVAKYI

SEQ ID NO: 2539 - protein, 227 aa, Schizosaccharomyces pombe
MASKGAYKRLMKEYLALQKNPVELVDAKPATENILEWHYIITGPPDTPYEGGQYHGTLIFPPDYPFKPPAIRMITPSGRFQTNTRLCLSFSDFHPKSWNPSWMVSTILVGLVSFMTSDEITTGGIVTSESTRRTYAKDTKRFNIMDNPKFLIMFPELIDKNREDIAKAAAEAALIEPQQIHSTPVSSNECKKNEPFNSKQSWVKSRWSIAVLVFFALALARFFGADS

SEQ ID NO: 2540 - protein, 267 aa, Schizosaccharomyces pombe
MMGINERKGFDFEYYQRNLLLQEKGFPTPKATSTGTTIVGVIAKDCIVLGADTRATAGPIIADKNCKKLHLISPNIWCAGAGTAADTEFVTSMISSNIELHSLYTNRKPRVVTALTMLKQHLFRYQGHIGAYLVLGGYDCKGPHLFTIAAHGSSDKLPYVALGSGSLAAISVLETKYQPDLERHEAMELVKEAIEAGIFNDLGSGSNCDLVVIDEEKATPYRGYSKPNERATKQSKYTYDRGTTAVLKEDIYKFVTVQDLDEMQVDV

SEQ ID NO: 2541 - protein, 868 aa, Saccharomyces cerevisiae
MSDNRRRRREEDDSDSENELPPSSPQQHFRGGMNPVSSPIGSPDMINPEGDDNEVDDVPDIDEVEEQMNEVDLMDDNMYEDYAADHNRDRYDPDQVDDREQQELSLSERRRIDAQLNERDRLLRNVAYIDDEDEEQEGAAQLDEMGLPVQRRRRRRQYEDLENSDDDLLSDMDIDPLREELTLESLSNVKANSYSEWITQPNVSRTIARELKSFLLEYTDETGRSVYGARIRTLGEMNSESLEVNYRHLAESKAILALFLAKCPEEMLKIFDLVAMEATELHYPDYARIHSEIHVRISDFPTIYSLRELRESNLSSLVRVTGVVTRRTGVFPQLKYVKFNCLKCGSILGPFFQDSNEEIRISFCTNCKSKGPFRVNGEKTVYRNYQRVTLQEAPGTVPPGRLPRHREVILLADLVDVSKPGEEVEVTGIYKNNYDGNLNAKNGFPVFATIIEANSIKRREGNTANEGEEGLDVFSWTEEEEREFRKISRDRGIIDKIISSMAPSIYGHRDIKTAVACSLFGGVPKNVNGKHSIRGDINVLLLGDPGTAKSQILKYVEKTAHRAVFATGQGASAVGLTASVRKDPITKEWTLEGGALVLADKGVCLIDEFDKMNDQDRTSIHEAMEQQSISISKAGIVTTLQARCSIIAAANPNGGRYNSTLPLAQNVSLTEPILSRFDILCVVRDLVDEEADERLATFVVDSHVRSHPENDEDREGEELKNNGESAIEQGEDEINEQLNARQRRLQRQRKKEEEISPIPQELLMKYIHYARTKIYPKLHQMDMDKVSRVYADLRRESISTGSFPITVRHLESILRIAESFAKMRLSEFVSSYDLDRAIKVVVDSFVDAQKVSVRRQLRRSFAIYTLGH

SEQ ID NO: 2542 - protein, 268 aa, Saccharomyces cerevisiae
MVLEATVLVIDNSEYSRNGDFPRTRFEAQIDSVEFIFQAKRNSNPENTVGLISGAGANPRVLSTFTAEFGKILAGLHDTQIEGKLHMATALQIAQLTLKHRQNKVQHQRIVAFVCSPISDSRDELIRLAKTLKKNNVAVDIINFGEIEQNTELLDEFIAAVNNPQEETSHLLTVTPGPRLLYENIASSPIILEEGSSGMGAFGGSGGDSDANGTFMDFGVDPSMDPELAMALRLSMEEEQQRQERLRQQQQQQDQPEQSEQPEQHQDK

SEQ ID NO: 2543 - protein, 1024 aa, Saccharomyces cerevisiae
MSSNNSGLSAAGEIDESLYSRQLYVLGKEAMLKMQTSNVLILGLKGLGVEIAKNVVLAGVKSMTVFDPEPVQLADLSTQFFLTEKDIGQKRGDVTRAKLAELNAYVPVNVLDSLDDVTQLSQFQVVVATDTVSLEDKVKINEFCHSSGIRFISSETRGLFGNTFVDLGDEFTVLDPTGEEPRTGMVSDIEPDGTVTMLDDNRHGLEDGNFVRFSEVEGLDKLNDGTLFKVEVLGPFAFRIGSVKEYGEYKKGGIFTEVKVPRKISFKSLKQQLSNPEFVFSDFAKFDRAAQLHLGFQALHQFAVRHNGELPRTMNDEDANELIKLVTDLSVQQPEVLGEGVDVNEDLIKELSYQARGDIPGVVAFFGGLVAQEVLKACSGKFTPLKQFMYFDSLESLPDPKNFPRNEKTTQPVNSRYDNQIAVFGLDFQKKIANSKVFLVGSGAIGCEMLKNWALLGLGSGSDGYIVVTDNDSIEKSNLNRQFLFRPKDVGKNKSEVAAEAVCAMNPDLKGKINAKIDKVGPETEEIFNDSFWESLDFVTNALDNVDARTYVDRRCVFYRKPLLESGTLGTKGNTQVIIPRLTESYSSSRDPPEKSIPLCTLRSFPNKIDHTIAWAKSLFQGYFTDSAENVNMYLTQPNFVEQTLKQSGDVKGVLESISDSLSSKPHNFEDCIKWARLEFEKKFNHDIKQLLFNFPKDAKTSNGEPFWSGAKRAPTPLEFDIYNNDHFHFVVAGASLRAYNYGIKSDDSNSKPNVDEYKSVIDHMIIPEFTPNANLKIQVNDDDPDPNANAANGSDEIDQLVSSLPDPSTLAGFKLEPVDFEKDDDTNHHIEFITACSNCRAQNYFIETADRQKTKFIAGRIIPAIATTTSLVTGLVNLELYKLIDNKTDIEQYKNGFVNLALPFFGFSEPIASPKGEYNNKKYDKIWDRFDIKGDIKLSDLIEHFEKDEGLEITMLSYGVSLLYASFFPPKKLKERLNLPITQLVKLVTKKDIPAHVSTMILEICADDKEGEDVEVPFITIHL

SEQ ID NO: 2544 - protein, 340 aa, Saccharomyces cerevisiae
MSTSTEKRSKENLPWVEKYRPETLDEVYGQNEVITTVRKFVDEGKLPHLLFYGPPGTGKTSTIVALAREIYGKNYSNMVLELNASDDRGIDVVRNQIKDFASTRQIFSKGFKLIILDEADAMTNAAQNALRRVIERYTKNTRFCVLANYAHKLTPALLSRCTRFRFQPLPQEAIERRIANVLVHEKLKLSPNAEKALIELSNGDMRRVLNVLQSCKATLDNPDEDEISDDVIYECCGAPRPSDLKAVLKSILEDDWGTAHYTLNKVRSAKGLALIDLIEGIVKILEDYELQNEETRVHLLTKLADIEYSISKGGNDQIQGSAVIGAIKASFENETVKANV

SEQ ID NO: 2545 - protein, 630 aa, Saccharomyces cerevisiae
MSSERVLSYAPAFKSFLDTSFFQELSRLKLDVLKLDSTCQPLTVNLDLHNIPKSADQVPLFLTNRSFEKHNNKRTNEVPLQGSIFNFNVLDEFKNLDKQLFLHQRALECWEDGIKDINKCVSFVIISFADLKKYRFYYWLGVPCFQRPSSTVLHVRPEPSLKGLFSKCQKWFDVNYSKWVCILDADDEIVNYDKCIIRKTKVLAIRDTSTMENVPSALTKNFLSVLQYDVPDLIDFKLLIIRQNEGSFALNATFASIDPQSSSSNPDMKVSGWERNVQGKLAPRVVDLSSLLDPLKIADQSVDLNLKLMKWRILPDLNLDIIKNTKVLLLGAGTLGCYVSRALIAWGVRKITFVDNGTVSYSNPVRQALYNFEDCGKPKAELAAASLKRIFPLMDATGVKLSIPMIGHKLVNEEAQHKDFDRLRALIKEHDIIFLLVDSRESRWLPSLLSNIENKTVINAALGFDSYLVMRHGNRDEQSSKQLGCYFCHDVVAPTDSLTDRTLDQMCTVTRPGVAMMASSLAVELMTSLLQTKYSGSETTVLGDIPHQIRGFLHNFSILKLETPAYEHCPACSPKVIEAFTDLGWEFVKKALEHPLYLEEISGLSVIKQEVERLGNDVFEWEDDESDEIA

SEQ ID NO: 2546 - protein, 266 aa, Saccharomyces cerevisiae
MNHDPFSWGRPADSTYGAYNTQIANAGASPMVNTQQPIVTGTSVISMKYDNGVIIAADNLGSYGSLLRFNGVERLIPVGDNTVVGISGDISDMQHIERLLKDLVTENAYDNPLADAEEALEPSYIFEYLATVMYQRRSKMNPLWNAIIVAGVQSNGDQFLRYVNLLGVTYSSPTLATGFGAHMANPLLRKVVDRESDIPKTTVQVAEEAIVNAMRVLYYRDARSSRNFSLAIIDKNTGLTFKKNLQVENMKWDFAKDIKGYGTQKI

SEQ ID NO: 2547 - protein, 165 aa, Saccharomyces cerevisiae
MSKTAQKRLLKELQQLIKDSPPGIVAGPKSENNIFIWDCLIQGPPDTPYADGVFNAKLEFPKDYPLSPPKLTFTPSILHPNIYPNGEVCISILHSPGDDPNMYELAEERWSPVQSVEKILLSVMSMLSEPNIESGANIDACILWRDNRPEFERQVKLSILKSLGF

SEQ ID NO: 2548 - protein, 287 aa, Saccharomyces cerevisiae
MQAIADSFSVPNRLVKELQYDNEQNLESDFVTGASQFQRLAPSLTVPPIASPQQFLRAHTDDSRNPDCKIKIAHGTTTLAFRFQGGIIVAVDSRATAGNWVASQTVKKVIEINPFLLGTMAGGAADCQFWETWLGSQCRLHELREKERISVAAASKILSNLVYQYKGAGLSMGTMICGYTRKEGPTIYYVDSDGTRLKGDIFCVGSGQTFAYGVLDSNYKWDLSVEDALYLGKRSILAAAHRDAYSGGSVNLYHVTEDGWIYHGNHDVGELFWKVKEEEGSFNNVIG

SEQ ID NO: 2549 - protein, 640 aa, Saccharomyces cerevisiae
MRRERQRMMSFEDKDKDDLDNSNSNNSSEMTDTAMMPPLKRLLITGSSDDLAQGSSGKKKMTMATRSPSSSPDLATNDSGTRVQPLPEYNFTKFCYRHNPDIQFSPTHTACYKQDLKRTQEINANIAKLPLQEQSDIHHIISKYSNSNDKIRKLILDGILSTSCFPQLSYISSLVTHMIKIDFISILPQELSLKILSYLDCQSLCNATRVCRKWQKLADDDRVWYHMCEQHIDRKCPNCGWGLPLLHMKRARIQQNSTGSSSNADIQTQTTRPWKVIYRERFKVESNWRKGHCRIQEFKGHMDGVLTLQFNYRLLFTGSYDSTIGIWDLFTGKLIRRLSGHSDGVKTLYFDDRKLITGSLDKTIRVWNYITGECISTYRGHSDSVLSVDSYQKVIVSGSADKTVKVWHVESRTCYTLRGHTEWVNCVKLHPKSFSCFSCSDDTTIRMWDIRTNSCLKVFRGHVGQVQKIIPLTIKDVENLATDNTSDGSSPQDDPTMTDGADESDTPSNEQETVLDENIPYPTHLLSCGLDNTIKLWDVKTGKCIRTQFGHVEGVWDIAADNFRIISGSHDGSIKVWDLQSGKCMHTFNGRRLQRETQHTQTQSLGDKVAPIACVCIGDSECFSGDEFGCVKMYKFDLND

SEQ ID NO: 2550 - protein, 308 aa, Schizosaccharomyces pombe
MESLQRLLQGARMGTGMMGDQPLVDNSECVYISSLALLKMLRHGRHGTPMEVMGLMLGEFVDDFTVRVVDVFAMPQSGTGVSVEAVDPVFQKNMMDMLKQTGRPEMVVGWYHSHPGFGCWLSSVDINTQQSFEQLTPRAVAVVVDPIQSVKGKVVIDAFRLINPSTLMMGQEPRQTTSNLGHINKPSIQALIHGLGRHYYSLRINYKKTELEEIMLLNLHKQPWAHGLLLENFNSAAEKNHASIDKMKSLSEQYTERVQNEVTLSPEQLRIQYVGKQDPKKHLDAEVQKCIDNNISSMLACMLDSVAF

SEQ ID NO: 2551 - protein, 147 aa, Schizosaccharomyces pombe
MALKRINRELADLGKDPPSSCSAGPVGDDLFHWQATIMGPADSPYAGGVFFLSIHFPTDYPFKPPKVNFTTRIYHPNINSNGSICLDILRDQWSPALTISKVLLSICSLLTDPNPDDPLVPEIAHVYKTDRSRYELSAREWTRKYAI

SEQ ID NO: 2552 - protein, 121 aa, Saccharomyces cerevisiae
MSNEVDRMDVDEDESQNIAQSSNQSAPVETKKKRFEIKKWTAVAFWSWDIAVDNCAICRNHIMEPCIECQPKAMTDTDNECVAAWGVCNHAFHLHCINKWIKTRDACPLDNQPWQLARCGR

SEQ ID NO: 2553 - protein, 261 aa, Saccharomyces cerevisiae
MTQEFIDKVSSYLTPDVDIAPISQGAEAIVFTTTTHPYLPRAKDSHQKYIIKYRPPKRYRHPQIDQALTKHRTLNESRLLAKLYLIPGLCVPQLIACDPYNGFIWLEFLGEDLPGGHGFSNLKNFLWMHDQDPYSDLVATTLRKVGRQIGLLHWNDYCHGDLTSSNIVLVRDGARWTPHLIDFGLGSVSNLVEDKGVDLYVLERAILSTHSKHAEKYNAWIMEGFEEVYREQGAKGAKKLKEVTKRFEEVRLRGRKRSMLG

SEQ ID NO: 2554 - protein, 438 aa, Schizosaccharomyces pombe
MSTLEELDALDQSQQGGSSNNEGLDGIEQEILAAGIDELNSRTRLLENDIKVMKSEFQRLTHEKSTMLEKIKENQEKISNNKMLPYLVGNVVEILDMQPDEVDVQESANQNSEATRVGKSAVIKTSTRQTIFLPLIGLVEPEELHPGDLIGVNKDSYLIIDKLPSEYDSRVKAMEVDEKPTERYSDIGGLSKQIEELFEAIVLPMQQADKFRKLGVKPPKGCLMFGPPGTGKTLLARACAAQSNATFLKLAAPQLVQMFIGDGAKLVRDAFALAKEKSPAIIFIDELDAIGTKRFDSEKAGDREVQRTMLELLNQLDGFSSDDRVKVIAATNRVDTLDPALLRSGRLDRKLEFPLPNEEARVGILRIHSRKMAIDDDINWEELARSTDEYNGAMLKSVCVEAGMIALRQGDTKINHEHFMDGILEVQMRKSKTLQYFA

SEQ ID NO: 2555 - protein, 1012 aa, Schizosaccharomyces pombe
MSNNMNIDQTDQNTIDEGLYSRQLYVLGHEAMKQMSQSNVLIIGCKGLGVEIAKNVCLAGVKSVTLYDPQPTRIEDLSSQYFLTEDDIGVPRAKVTVSKLAELNQYVPVSVVDELSTEYLKNFKCVVVTETSLTKQLEINDFTHKNHIAYIAADSRGLFGSIFCDFGENFICTDTDGNEPLTGMIASITDDGVVTMLEETRHGLENGDFVKFTEVKGMPGLNDGTPRKVEVKGPYTFSIGSVKDLGSAGYNGVFTQVKVPTKISFKSLRESLKDPEYVYPDFGKMMRPPQYHIAFQALSAFADAHEGSLPRPRNDIDAAEFFEFCKKIASTLQFDVELDEKLIKEISYQARGDLVAMSAFLGGAVAQEVLKATTSKFYPLKQYFYFDSLESLPSSVTISEETCKPRGCRYDGQIAVFGSEFQEKIASLSTFLVGAGAIGCEMLKNWAMMGVATGESGHISVTDMDSIEKSNLNRQFLFRPRDVGKLKSECASTAVSIMNPSLTGKITSYQERVGPESEGIFGDEFFEKLSLVTNALDNVEARMYVDRRCVFFEKPLLESGTLGTKGNTQVVVPHLTESYGSSQDPPEKSFPICTLKNFPNRIEHTIAWARDLFEGLFKQPIDNVNMYLSSPNFLETSLKTSSNPREVLENIRDYLVTEKPLSFEECIMWARLQFDKFFNNNIQQLLFNFPKDSVTSTGQPFWSGPKRAPTPLSFDIHNREHFDFIVAAASLYAFNYGLKSETDPAIYERVLAGYNPPPFAPKSGIKIQVNENEEAPETAANKDKQELKSIADSLPPPSSLVGFRLTPAEFEKDDDSNHHIDFITAASNLRAMNYDITPADRFKTKFVAGKIVPAMCTSTAVVSGLVCLELVKLVDGKKKIEEYKNGFFNLAIGLFTFSDPIASPKMKVNGKEIDKIWDRYNLPDCTLQELIDYFQKEEGLEVTMLSSGVSLLYANFQPPKKLAERLPLKISELVEQITKKKLEPFRKHLVLEICCDDANGEDVEVPFICIKL

SEQ ID NO: 2556 - protein, 434 aa, Saccharomyces cerevisiae
MATLEELDAQTLPGDDELDQEILNLSTQELQTRAKLLDNEIRIFRSELQRLSHENNVMLEKIKDNKEKIKNNRQLPYLVANVVEVMDMNEIEDKENSESTTQGGNVNLDNTAVGKAAVVKTSSRQTVFLPMVGLVDPDKLKPNDLVGVNKDSYLILDTLPSEFDSRVKAMEVDEKPTETYSDVGGLDKQIEELVEAIVLPMKRADKFKDMGIRAPKGALMYGPPGTGKTLLARACAAQTNATFLKLAAPQLVQMYIGEGAKLVRDAFALAKEKAPTIIFIDELDAIGTKRFDSEKSGDREVQRTMLELLNQLDGFSSDDRVKVLAATNRVDVLDPALLRSGRLDRKIEFPLPSEDSRAQILQIHSRKMTTDDDINWQELARSTDEFNGAQLKAVTVEAGMIALRNGQSSVKHEDFVEGISEVQARKSKSVSFYA

SEQ ID NO: 2557 - protein, 695 aa, Saccharomyces cerevisiae
MIVRMIRLCKGPKLLRSQFASASALYSTKSLFKPPMYQKAEINLIIPHRKHFLLRSIRLQSDIAQGKKSTKPTLKLSNANSKSSGFKDIKRLFVLSKPESKYIGLALLLILISSSVSMAVPSVIGKLLDLASESDGEDEEGSKSNKLYGFTKKQFFTALGAVFIIGAVANASRIIILKVTGERLVARLRTRTMKAALDQDATFLDTNRVGDLISRLSSDASIVAKSVTQNVSDGTRAIIQGFVGFGMMSFLSWKLTCVMMILAPPLGAMALIYGRKIRNLSRQLQTSVGGLTKVAEEQLNATRTIQAYGGEKNEVRRYAKEVRNVFHIGLKEAVTSGLFFGSTGLVGNTAMLSLLLVGTSMIQSGSMTVGELSSFMMYAVYTGSSLFGLSSFYSELMKGAGAAARVFELNDRKPLIRPTIGKDPVSLAQKPIVFKNVSFTYPTRPKHQIFKDLNITIKPGEHVCAVGPSGSGKSTIASLLLRYYDVNSGSIEFGDEDIRNFNLRKYRRLIGYVQQEPLLFNGTILDNILYCIPPEIAEQDDRIRRAIGKANCTKFLANFPDGLQTMVGARGAQLSGGQKQRIALARAFLLDPAVLILDEATSALDSQSEEIVAKNLQRRVERGFTTISIAHRLSTIKHSTRVIVLGKHGSVVETGSFRDLIAIPNSELNALLAEQQDEEGKGGVIDLDNSVAREV

SEQ ID NO: 2558 - protein, 270 aa, Schizosaccharomyces pombe
MSTLDLNHLADLYDRKDWNACKKELLKLKVELAKQNLFVPTSDKEKASFARNVFEYGVLVSIQTCDIESFARYASQVIPFYHDSLVPSSRMGLVTGLNLLYLLSENRIAEFHTALESVPDKSLFERDPYVEWVISLEQNVMEGAFDKVASMIRSCNFPEFSYFMKIVMSMVRNEIATCAEKVYSEIPLSNATSLLYLENTKETEKLAEERGWDIRDGVIYFPKEANALETEDGMLIDEEDELELPPTASKHTISSIRQLLSYTSELEQIV

SEQ ID NO: 2559 - protein, 250 aa, Saccharomyces cerevisiae
MATKQAHKRLTKEYKLMVENPPPYILARPNEDNILEWHYIITGPADTPYKGGQYHGTLTFPSDYPYKPPAIRMITPNGRFKPNTRLCLSMSDYHPDTWNPGWSVSTILNGLLSFMTSDEATTGSITTSDHQKKTLARNSISYNTFQNVRFKLIFPEVVQENVETLEKRKLDEGDAANTGDETEDPFTKAAKEKVISLEEILDPEDRIRAEQALRQSENNSKKDGKEPNDSSSMVYIGIAIFLFLVGLFMK

SEQ ID NO: 2560 - protein, 250 aa, Saccharomyces cerevisiae
MTDRYSFSLTTFSPSGKLGQIDYALTAVKQGVTSLGIKATNGVVIATEKKSSSPLAMSETLSKVSLLTPDIGAVYSGMGPDYRVLVDKSRKVAHTSYKRIYGEYPPTKLLVSEVAKIMQEATQSGGVRPFGVSLLIAGHDEFNGFSLYQVDPSGSYFPWKATAIGKGSVAAKTFLEKRWNDELELEDAIHIALLTLKESVEGEFNGDTIELAIIGDENPDLLGYTGIPTDKGPRFRKLTSQEINDRLEAL

SEQ ID NO: 2561 - protein, 483 aa, Saccharomyces cerevisiae
MLPTSVSRSLYLKTFRSHLLRAPQIVLKRMSSSIDISKINSWNKEFQSDLTHQLATTVLKNYNADDALLNKTRLQKQDNRVFNTVVSTDSTPVTNQKSSGRCWLFAATNQLRLNVLSELNLKEFELSQAYLFFYDKLEKANYFLDQIVSSADQDIDSRLVQYLLAAPTEDGGQYSMFLNLVKKYGLIPKDLYGDLPYSTTASRKWNSLLTTKLREFAETLRTALKERSADDSIIVTLREQMQREIFRLMSLFMDIPPVQPNEQFTWEYVDKDKKIHTIKSTPLEFASKYAKLDPSTPVSLINDPRHPYGKLIKIDRLGNVLGGDAVIYLNVDNETLSKLVVKRLQNNKAVFFGSHTPKFMDKKTGVMDIELWNYPAIGYNLPQQKASRIRYHESLMTHAMLITGCHVDETSKLPLRYRVENSWGKDSGKDGLYVMTQKYFEEYCFQIVVDINELPKELASKFTSGKEEPIVLPIWDPMGALAK

SEQ ID NO: 2562 - protein, 448 aa, Schizosaccharomyces pombe
MGQAQSGNFSNFGDGANGDNKKDQKKDKPKYEPPVPTRTGRRKKKAQSGPDASAKLPTVIPTTRCRLRLLKMQRIHDHLLMEEEYVQNQERLKPQDERTQEERNRVDEIRGTPMSVGTLEEIIDDDHAIVSTAGPEYYVSIMSFVDKDMLEPGCSVLLHHKAMSIVGLLLDDTDPMINVMKLDKAPTESYADIGGLESQIQEIKEAVELPLTHPELYEEMGIKPPKGVILYGAPGTGKTLLAKAVANQTSATFLRVVGSELIQKYLGDGPRLVRQLFNAAEEHSPSIVFIDEIDAIGTKRYDAQSGAEREIQRTMLELLNQLDGFDTSQRDIKVIMATNRISDLDPALIRPGRIDRKILFENPDEATKRKIFTIHTSKMNLGEDVNLEELIQCKDDLSGAEIKAIVSEAGLLALRERRMRVVMDDFRQAREKVLKTKDEGGPAGGLYI

SEQ ID NO: 2563 - protein, 153 aa, Saccharomyces cerevisiae
MASLPKRIIKETEKLVSDPVPGITAEPHDDNLRYFQVTIEGPEQSPYEDGIFELELYLPDDYPMEAPKVRFLTKIYHPNIDRLGRICLDVLKTNWSPALQIRTVLLSIQALLASPNPNDPLANDVAEDWIKNEQGAKAKAREWTKLYAKKKPE

SEQ ID NO: 2564 - protein, 437 aa, Saccharomyces cerevisiae
MGQGVSSGQDKKKKKGSNQKPKYEPPVQSKFGRKKRKGGPATAEKLPNIYPSTRCKLKLLRMERIKDHLLLEEEFVSNSEILKPFEKKQEEEKKQLEEIRGNPLSIGTLEEIIDDDHAIVTSPTMPDYYVSILSFVDKELLEPGCSVLLHHKTMSIVGVLQDDADPMVSVMKMDKSPTESYSDIGGLESQIQEIKESVELPLTHPELYEEMGIKPPKGVILYGAPGTGKTLLAKAVANQTSATFLRIVGSELIQKYLGDGPRLCRQIFKVAGENAPSIVFIDEIDAIGTKRYDSNSGGEREIQRTMLELLNQLDGFDDRGDVKVIMATNKIETLDPALIRPGRIDRKILFENPDLSTKKKILGIHTSKMNLSEDVNLETLVTTKDDLSGADIQAMCTEAGLLALRERRMQVTAEDFKQAKERVMKNKVEENLEGLYL

SEQ ID NO: 2565 - protein, 773 aa, Saccharomyces cerevisiae
MLNGRLPLLRLGICRNMLSRPRLAKLPSIRFRSLVTPSSSQLIPLSRLCLRSPAVGKSLILQSFRCNSSKTVPETSLPSASPISKGSARSAHAKEQSKTDDYKDIIRLFMLAKRDWKLLLTAILLLTISCSIGMSIPKVIGIVLDTLKTSSGSDFFDLKIPIFSLPLYEFLSFFTVALLIGCAANFGRFILLRILSERVVARLRANVIKKTLHQDAEFFDNHKVGDLISRLGSDAYVVSRSMTQKVSDGVKALICGVVGVGMMCSLSPQLSILLLFFTPPVLFSASVFGKQIRNTSKDLQEATGQLTRVAEEQLSGIKTVQSFVAEGNELSRYNVAIRDIFQVGKTAAFTNAKFFTTTSLLGDLSFLTVLAYGSYLVLQSQLSIGDLTAFMLYTEYTGNAVFGLSTFYSEIMQGAGAASRLFELTDRKPSISPTVGHKYKPDRGVIEFKDVSFSYPTRPSVQIFKNLNFKIAPGSSVCIVGPSGRGKSTIALLLLRYYNPTTGTITIDNQDISKLNCKSLRRHIGIVQQEPVLMSGTIRDNITYGLTYTPTKEEIRSVAKQCFCHNFITKFPNTYDTVIGPHGTLLSGGQKQRIAIARALIKKPTILILDEATSALDVESEGAINYTFGQLMKSKSMTIVSIAHRLSTIRRSENVIVLGHDGSVVEMGKFKELYANPTSALSQLLNEKAAPGPSDQQLQIEKVIEKEDLNESKEHDDQKKDDNDDNDNNHDNDSNNQSPETKDNNSDDIEKSVEHLLKDAAKEANPIKITPQP

SEQ ID NO: 2566 - protein, 274 aa, Saccharomyces cerevisiae
MPSLAELTKSLSIAFENGDYAACEKLLPPIKIELIKNNLLIPDLSIQNDIYLNDLMITKRILEVGALASIQTFNFDSFENYFNQLKPYYFSNNHKLSESDKKSKLISLYLLNLLSQNNTTKFHSELQYLDKHIKNLEDDSLLSYPIKLDRWLMEGSYQKAWDLLQSGSQNISEFDSFTDILKSAIRDEIAKNTELSYDFLPLSNIKALLFFNNEKETEKFALERNWPIVNSKVYFNNQSKEKADYEDEMMHEEDQKTNIIEKAMDYAISIENIV

SEQ ID NO: 2567 - protein, 299 aa, Saccharomyces cerevisiae
MDCKILVLGAGGLGCEILKNLTMLSFVKQVHIVDIDTIELTNLNRQFLFCDKDIGKPKAQVAAQYVNTRFPQLEVVAHVQDLTTLPPSFYKDFQFIISGLDAIEPRRFINETLVKLTLESNYEICIPFIDGGTEGLKGHVKTIIPGITACWECSIDTLPSQQDTVPMCTIANNPRCIEHVVEYVSTIQYPDLNIESTADMEFLLEKCCERAAQFSISTEKLSTSFILGIIKSIIPSVSTTNAMVAATCCTQMVKIYNDLIDLENGNNFTLINCSEGCFMYSFKFERLPDCTVCSNSNSN

SEQ ID NO: 2568 - protein, 260 aa, Saccharomyces cerevisiae
MFLTRSEYDRGVSTFSPEGRLFQVEYSLEAIKLGSTAIGIATKEGVVLGVEKRATSPLLESDSIEKIVEIDRHIGCAMSGLTADARSMIEHARTAAVTHNLYYDEDINVESLTQSVCDLALRFGEGASGEERLMSRPFGVALLIAGHDADDGYQLFHAEPSGTFYRYNAKAIGSGSEGAQAELLNEWHSSLTLKEAELLVLKILKQVMEEKLDENNAQLSCITKQDGFKIYDNEKTAELIKELKEKEAAESPEEADVEMS

SEQ ID NO: 2569 - protein, 405 aa, Saccharomyces cerevisiae
MFSLKALLPLALLLVSANQVAAKVHKAKIYKHELSDEMKEVTFEQHLAHLGQKYLTQFEKANPEVVFSREHPFFTEGGHDVPLTNYLNAQYYTDITLGTPPQNFKVILDTGSSNLWVPSNECGSLACFLHSKYDHEASSSYKANGTEFAIQYGTGSLEGYISQDTLSIGDLTIPKQDFAEATSEPGLTFAFGKFDGILGLGYDTISVDKVVPPFYNAIQQDLLDEKRFAFYLGDTSKDTENGGEATFGGIDESKFKGDITWLPVRRKAYWEVKFEGIGLGDEYAELESHGAAIDTGTSLITLPSGLAEMINAEIGAKKGWTGQYTLDCNTRDNLPDLIFNFNGYNFTIGPYDYTLEVSGSCISAITPMDFPEPVGPLAIVGDAFLRKYYSIYDLGNNAVGLAKAI

SEQ ID NO: 2570 - protein, 258 aa, Saccharomyces cerevisiae
MGSRRYDSRTTIFSPEGRLYQVEYALESISHAGTAIGIMASDGIVLAAERKVTSTLLEQDTSTEKLYKLNDKIAVAVAGLTADAEILINTARIHAQNYLKTYNEDIPVEILVRRLSDIKQGYTQHGGLRPFGVSFIYAGYDDRYGYQLYTSNPSGNYTGWKAISVGANTSAAQTLLQMDYKDDMKVDDAIELALKTLSKTTDSSALTYDRLEFATIRKGANDGEVYQKIFKPQEIKDILVKTGITKKDEDEEADEDMK

SEQ ID NO: 2571 - protein, 184 aa, Schizosaccharomyces pombe
MSSPRRRIETDVMKLLMSDYEVTLVNDNMQEFYVRFHGPSETPYSGGIWKVHVELPSEYPWKSPSIGFVNRIFHPNIDELSGSVCLDVINQTWSPMFDMINIFEVFLPQLLRYPNASDPLNGEAAALLLREPNTYYAKVRDYIARYANKEDADITLNDSSDDDTMSSIDTESGDEIAGPMDSDF

SEQ ID NO: 2572 - protein, 467 aa, Saccharomyces cerevisiae
MPPKEDWEKYKAPLEDDDKKPDDDKIVPLTEGDIQVLKSYGAAPYAAKLKQTENDLKDIEARIKEKAGVKESDTGLAPSHLWDIMGDRQRLGEEHPLQVARCTKIIKGNGESDETTTDNNNSGNSNSNSNQQSTDADEDDEDAKYVINLKQIAKFVVGLGERVSPTDIEEGMRVGVDRSKYNIELPLPPRIDPSVTMMTVEEKPDVTYSDVGGCKDQIEKLREVVELPLLSPERFATLGIDPPKGILLYGPPGTGKTLCARAVANRTDATFIRVIGSELVQKYVGEGARMVRELFEMARTKKACIIFFDEIDAVGGARFDDGAGGDNEVQRTMLELITQLDGFDPRGNIKVMFATNRPNTLDPALLRPGRIDRKVEFSLPDLEGRANIFRIHSKSMSVERGIRWELISRLCPNSTGAELRSVCTEAGMFAIRARRKVATEKDFLKAVDKVISGYKKFSSTSRYMQYN

SEQ ID NO: 2573 - protein, 311 aa, Aspergillus oryzae
MSTPGAQEVLFRTGIAAVNSTNHLRVYFQDSHGSIRESLYESGWANGTAKNVIAKAKLGTPLAATSKELKNIRVYSLTEDNVLQEAAYDSGSGWYNGALAGAKFTVAPYSRIGSVFLAGTNALQLRIYAQKTDNTIQEYMWNGDGWKEGTNLGVALPGTGIGVTCWRYTDYDGPSIRVWFQTDNLKLVQRAYDPHTGWYKELTTIFDKAPPRCAIAATNFNPGKSSIYMRIYFVNSDNTIWQVCWDHGQGYHDKRTITPVIQGSEIAIISWEGPELRLYFQNGTYVSAISEWTWGKAHGSQLGRRALPPAE

SEQ ID NO: 2574 - protein, 190 aa, Saccharomyces cerevisiae
MAGWDIFGWFRDVLASLGLWNKHGKLLFLGLDNAGKTTLLHMLKNDRLATLQPTWHPTSEELAIGNIKFTTFDLGGHIQARRLWKDYFPEVNGIVFLVDAADPERFDEARVELDALFNIAELKDVPFVILGNKIDAPNAVSEAELRSALGLLNTTGSQRIEGQRPVEVFMCSVVMRNGYLEAFQWLSQYI

SEQ ID NO: 2575 - protein, 188 aa, Saccharomyces cerevisiae
MLKLRQLQKKKQKENENSSSIQPNLSAARIRLKRDLDSLDLPPTVTLNVITSPDSADRSQSPKLEVIVRPDEGYYNYGSINFNLDFNEVYPIEPPKVVCLKKIFHPNIDLKGNVCLNILREDWSPALDLQSIITGLLFLFLEPNPNDPLNKDAAKLLCEGEKEFAEAVRLTMSGGSIEHVKYDNIVSP

SEQ ID NO: 2576 - protein, 388 aa, Schizosaccharomyces pombe
MSERDTALEKYKSYLLQHREWDSKLKDLRFGNRDLVKKYDKTEDDIKSLQSVGQIIGEVLKQLDSERFIVKASSGPRYVVGCRNNVDQSHLVQGVRVSLDMTTLTIMRILPREVDPLVYNMSIEDPGDISFAGVGGLNEQIRELREVIELPLKNPELFLRVGIKPPKGVLLYGPPGTGKTLLARAVAASLGVNFLKVVSSAIVDKYIGESARIIREMFGYAKEHEPCVIFMDEIDAIGGRRFSEGTSADREIQRTLMELLNQMDGFDYLGQTKIIMATNRPDTLDPALLRPGRLDRKIEIPLPNEVGRMEILKIHLEKVSKQGEIDYEALVKLTDGTNGADLRNVVTEAGFIAIKEDRDYVIQSDLMSAARKVADLKKLEGTIDYQKL

SEQ ID NO: 2577 - protein, 532 aa, Saccharomyces cerevisiae
MKAFTSLLCGLGLSTTLAKAISLQRPLGLDKDVLLQAAEKFGLDLDLDHLLKELDSNVLDAWAQIEHLYPNQVMSLETSTKPKFPEAIKTKKDWDFVVKNDAIENYQLRVNKIKDPKILGIDPNVTQYTGYLDVEDEDKHFFFWTFESRNDPAKDPVILWLNGGPGCSSLTGLFFELGPSSIGPDLKPIGNPYSWNSNATVIFLDQPVNVGFSYSGSSGVSNTVAAGKDVYNFLELFFDQFPEYVNKGQDFHIAGESYAGHYIPVFASEILSHKDRNFNLTSVLIGNGLTDPLTQYNYYEPMACGEGGEPSVLPSEECSAMEDSLERCLGLIESCYDSQSVWSCVPATIYCNNAQLAPYQRTGRNVYDIRKDCEGGNLCYPTLQDIDDYLNQDYVKEAVGAEVDHYESCNFDINRNFLFAGDWMKPYHTAVTDLLNQDLPILVYAGDKDFICNWLGNKAWTDVLPWKYDEEFASQKVRNWTASITDEVAGEVKSYKHFTYLRVFNGGHMVPFDVPENALSMVNEWIHGGFSL

SEQ ID NO: 2578 - protein, 318 aa, Saccharomyces cerevisiae
MSSNAQVKTPLPPAPAPKKESNFLIDFLMGGVSAAVAKTAASPIERVKLLIQNQDEMLKQGTLDRKYAGILDCFKRTATQEGVISFWRGNTANVIRYFPTQALNFAFKDKIKAMFGFKKEEGYAKWFAGNLASGGAAGALSLLFVYSLDYARTRLAADSKSSKKGGARQFNGLIDVYKKTLKSDGVAGLYRGFLPSVVGIVVYRGLYFGMYDSLKPLLLTGSLEGSFLASFLLGWVVTTGASTCSYPLDTVRRRMMMTSGQAVKYDGAFDCLRKIVAAEGVGSLFKGCGANILRGVAGAGVISMYDQLQMILFGKKFK

SEQ ID NO: 2579 - protein, 218 aa, Saccharomyces cerevisiae
MSSSKRRIETDVMKLLMSDHQVDLINDSMQEFHVKFLGPKDTPYENGVWRLHVELPDNYPYKSPSIGFVNKIFHPNIDIASGSICLDVINSTWSPLYDLINIVEWMIPGLLKEPNGSDPLNNEAATLQLRDKKLYEEKIKEYIDKYATKEKYQQMFGGDNDSDDSDSGGDLQEEDSDSDEDMDGTGVSSGDDSVDELSEDLSDIDVSDDDDYDEVANQ

SEQ ID NO: 2580 - protein, 244 aa, Schizosaccharomyces pombe
MSQARGFDRTITVFSPEGRLYQVEYAFKAFNNAGITSVGVTGKNCACVISQKKVPDKLIDASTVKHVFPITKGIGCVMTGSIADARAQVSRARSEAAEFEYKNGYPMPCDVLAKRMANIAQVSTQRAAMRPLGVAMTLVAVDDEIGPSLFKLDPAGFYIGYKATSAGPKQTETINWLEKRFKKDGIPSNLTDTVETGIQALMSSLSTDFKSTELQIGVVEDDKPFRVLSVEEIEAHLQSIAEKD

SEQ ID NO: 2581 - protein, 310 aa, Aspergillus oryzae
MSTPGAQEVLFRTGIAAVNSTNHLRVYFQDSHGSIRESLYESGWANGTAKNVIAKAKLGTPLAATSKELKNIRVYSLTEDNVLQEAAYDSGSGWYNGALAGAKFTVAPYSRIGSVFLAGTNALQLRIYAQKTDNTIQEYMWNGDGWKEGTNLGVALPGTGIGVTCWRYTDYDGPSIRVWFQTDNLKLVQRAYDPHTGWFKELTTIFDKAPPRCAIAATNFNPGKSSIYMRIYFVNSDNTIWQVCWDHGQGYHDKRTITPVIQGSEIAIISWEGPELRLYFQNGTYVSAISEWSWARHGSQLGRRALPPAE

SEQ ID NO: 2582 - protein, 765 aa, Schizosaccharomyces pombe
MNFEDIEDQDGIRLSWNTFSATPAENARAVIPIAAMYTPLHENERMTIEQYDPVACRAPCRAVLNPYCHVDLRARFWICPFCFQRNPLPAQYSDISSNSLPLELLSQSTTMEYVLSKPVKSPPVFLFVMDTAVDESELTALKDAVIVSLSLLPPDAIVGLITYGSLIQVHEIGFEAMPKSYVFQPAADYSTMKLQQLLALSGNQIRSSSSKAKISGTGITLNLGAASRFLMPVQKCEMHLLNILEQLQPDCLEVPAGQRQLRCTGAAVKIASDLLGIAFPKCGSRIELFCGGPCTVGLGQVVSTELKEPMRSHSEIANDKAKHFKKSKKFYSSLAERLSNQGHALDLFAGCLDQVGIMEMENLVNNTGGAIVLSDSFTTSIFKQSFQRLFSVDASGYLKMGFMANLEVLTSKGLTICGMIGNGVGENKKGTNISDTQIGISKTNSWKMAAISPKSSYALYFDLGKEMGNPNSQRPTQAFIQFLTYYQHSSGTYRLRVTTISRSFITGNAKSISESFDQEAAAAIVARMALFKCQTEDEMSVTRWIDRNLIRLCQHFADYRKEDPSSFRLLPNFTLYPQFIFHLRRSPFLHIFNNSPDETSFYRHMLNVADVNDSLIMIQPTLQSYSFNEPEGVPVLLDSVSIKPDVILLLDTYFHILIFHGSTIAQWRNAGYQEQPEYVNLKELLLAPRLEVTELLADRFPIPRFIVCDQGGSQARFLLSRINPSVSFNKSSQFSPMSKDSETVLTDDVNLQKFMDHLRKMAVIS

SEQ ID NO: 2583 - protein, 217 aa, Schizosaccharomyces pombe
MSDNRSRRIAKELADVQQDKQAGIQVWTINDDISHLKGMFRGPEGTPYEGGYFVVDIEIPIDYPFRPPKMNFDTKIYHPNVSSQTGAICLDILKDQWSPVYTMKSALISLQSLLCTPEPSNPQDAQVAQVYLQNYQQFVRTAREWTSSYAAAPAGVDLDAENTEFGGIDPNIITNLQQFGFSTELIVRVLQREHIKSQEDLKDYPNGINGILDQLLH

SEQ ID NO: 2584 - protein, 389 aa, Schizosaccharomyces pombe
MNSTEEIDLYNRWKALERQLEMLDLQEGFIKEDCKSLKRELIRAQEEVKRIQSVPLVIGQFLEAIDQNTAIVGSTTGSNYVVRILSTLDRELLKPSASVALQRHSNALVDILPPEADSSISMLRPDERPDVSYADVGGLDVQKQEVREAVELPLTQGDLYRQIGIDPPRGVLLYGPPGTGKTMLVKAVANSTAANFIRVVGSEFVQKYLGEGPRMVRDVFRMARENAPAIIFIDEIDAIATKRFDAQTGADREVQRILIELLTQMDGFDQGANVKVIMATNRADTLDPALLRPGRLDRKIEFPSYRDRRQRRLVFQTITAKMLLSPEVDLDTFIMRPDASSGAQIAAIMQDAGLLAVRKSRGVILQSDIEEAYARAVKPTDMEQFAFYK

SEQ ID NO: 2585 - protein, 1072 aa, Schizosaccharomyces pombe
MTYVTYLHKPSSIRNAVFCKFVNASSWNVIVAKVNCLEVYSYENNRLCLITSANIFAKIVNVKAFKPVSSPTDHIIVATDSFRYFTLFWDANDNTVSNGIKIQDCSERSLRESQSGPLLLVDPFQRVICLHVYQGLLTIIPIFKSKKRFMTSHNNPSLHDNFSVRIQELNVVDIAMLYNSSRPSLAVLYKDSKSIVHLSTYKINVREQEIDEDDVVCHDIEEGKLIPSENGGVFVFGEMYVYYISKDIQVSKLLLTYPITAFSPSISNDPETGLDSSIYIVADESGMLYKFKALFTDETVSMELEKLGESSIASCLIALPDNHLFVGSHFNNSVLLQLPSITKNNHKLEILQNFVNIAPISDFIIDDDQTGSSIITCSGAYKDGTLRIIRNSINIENVALIEMEGIKDFFSVSFRANYDNYIFLSLICETRAIIVSPEGVFSANHDLSCEESTIFVSTIYGNSQILQITTKEIRLFDGKKLHSWISPMSITCGSSFADNVCVAVAGGLILFFEGITEVGRYQCDTEVSSLCFTEENVVYVGLWSADIIMLTYCQDGISLTHSLKLTDIPRSIVYSQKYGDDGGTLYVSTNNGYVLMFNFQNGQVIEHSLRRNQLGVAPIILKHFDSKEKNAIFALGEKPQLMYYESDKLVITPLSCTEMLNISSYVNPSLGVNMLYCTNSYISLAKMSEIRSLNVQTVSVKGFPRRICSNSLFYFVLCMQLEESIGTQEQRLLSFLRVYEKNTLSEIAHHKFNEYEMVESIILMNDDKRVVVGTGFNFPDQDAPDSGRLMVFEMTSDNNIEMQAEHKVQGSVNTLVLYKHLIVAGINASVCIFEYEHGTMHVRNSIRTPTYTIDISVNQDEIIAADLMKSITVLQFIDDQLIEVARDYHPLWATSVEILSERKYFVTEADGNAVILLRDNVSPQLSDRKKLRWYKKFYLGELINKTRHCTFIEPQDKSLVTPQLLCATVDGSLMIVGDAGMSNTPLLLQLQDNIRKVIPSFGGLSHKEWKEYRGENETSPSDLIDGSLIESILGLREPILNEIVNGGHEGTKLDISVQDLKSIIENLEKLHP

SEQ ID NO: 2586 - protein, 856 aa, Saccharomyces cerevisiae
MSREVLPNNVTPLHYDITLEPNFRAFTFEGSLKIDLQINDHSINSVQINYLEIDFHSARIEGVNAIEVNKNENQQKATLVFPNGTFENLGPSAKLEIIFSGILNDQMAGFYRAKYTDKVTGETKYMATTQMEATDARRAFPCFDEPNLKATFAVTLVSESFLTHLSNMDVRNETIKEGKKYTTFNTTPKMSTYLVAFIVADLRYVESNNFRIPVRVYSTPGDEKFGQFAANLAARTLRFFEDTFNIEYPLPKMDMVAVHEFSAGAMENWGLVTYRVIDLLLDIENSSLDRIQRVAEVIQHELAHQWFGNLVTMDWWEGLWLNEGFATWMSWYSCNKFQPEWKVWEQYVTDNLQRALNLDSLRSSHPIEVPVNNADEINQIFDAISYSKGSSLLRMISKWLGEETFIKGVSQYLNKFKYGNAKTGDLWDALADASGKDVCSVMNIWTKRVGFPVLSVKEHKNKITLTQHRYLSTGDVKEEEDTTIYPILLALKDSTGIDNTLVLNEKSATFELKNEEFFKINGDQSGIFITSYSDERWAKLSKQANLLSVEDRVGLVADAKALSASGYTSTTNFLNLISNWKNEDSFVVWEQIINSLSALKSTWVFEPEDILNALDKFTLDLVLNKLSELGWNIGEDDSFAIQRLKVTLFSAACTSGNEKMQSIAVEMFEEYANGNKQAIPALFKAVVFNTVARLGGENNYEKIFNIYQNPVSSEEKIIALRALGRFEDKELLERTLSYLLDGTVLNQDFYIPMQGIRVHKKGIERLWAWMQEHWDEIAKRLQPGSPVLGGVLTLGLTNFTSFEALEKISAFYSRKVTKGFDQTLAQALDTIRSKAQWVSRDREIVATYLREHEYDQ

SEQ ID NO: 2587 - protein, 2052 aa, Schizosaccharomyces pombe
MQLHDPPAPLSQPSASRLQKYLLESAEKHAYDSNEESKTHLLQEVFLSLLNYNEDNWKYFLKEKPGAITSDFRLSRLQHSEPECAQELQDKRSGSKVCGHVFRAGEVIYRCKNCGLDNTCVLCAPCFHATNHEGHETHVSISTSYSGICDCGDPEAWNVDLNCKIHNVPDDEEQKKPEEVIPLELQHSIRTTIHILLDFILDVFSCSPVNLKAQSTVGSILADEEASRLSSAKYGVADRPCNVFRVMLWNDEVHTFDAVVGSVLEALDSSNTAFGLEVAQRVDSIGRFAVATSASVHEAIRIANAISKENLAVNVRTARDFFREDICGILLEWFDDLLESHVCYFADYLQIIVCDEILKNWSPGLEKPAKPEVNFNNLPLEIVNDDDSEDDIYAAEELLDVIANLQDETGVTRIANLGGDEDFEADMTDPTIAGFDHPLDDDNDVNDLLDFETEREDIDDLTDEVMETEENEAAEADYPGVNRNTRQDDVQDISMETESQNETDESQNTENVDYNPQTHTPVPIPTTATQDVVTIRPEFNSQLLNNLRQIINARRRPRPAAVCQVSLREDYWKSPHPIPPSSYSFVESPSSILRLDYFLLFDLKFWKRLRGLLSKLYVVPFNRNLLFKRLMGIRFVIHYRSLATAFLFADREPDHSVMFLSVQFFTTPSLAEAVVKDYDFLTNLNATTLSLLTQSNRPSTLFSSDIEYTPTIQLNRQVLKTRRTYNLFSDLGYLLQHPQVKKLVVDDTRYVHQYIDLLRVFQGVIPQQRAILSHVQWDFPHGKNILFVMQRVAMLSNTVSSCFTQAPYERLFYAIKCIITSITHPKLDIAESLEPLSCIPSSSLTNFTQPLVPFSVSRDPISFYHPLHWMLSNLFSYCRVDASSHWDKDTLLALLDHPLRVCVLLAQIDCNLWIRNGRSILLTDAFYRQLNNIEVSYDKDILAIQTILMFVDPNLVLNAVVQRFEFTDWLYNLTYNEHPNYDTERIPAMLCKMLELLIALITEREQILHVDIQDIIRTRLAQQLCFGPLAYSALLSTISSNLVESLSFDKIREEVTSYKAPDGLHDFGVYSLKDEYYDLVDPYYFHYNKNEREESDTILKKRLAKKNNVSAESIIIEPKIRFLEKDGHDIFFAAVNASTFSLIIFRAIEYALVQAESFGSSDIGNTILGDALQLCLISMKIHEFSKSNDFCSRSCAERYPTDSSIMREFGGSAYCLAELCFAILKSPKYKDVHVKVNAVLAGLQKNDPSAYSNMLEATHFELSTTSSTSDSNEIEKTQEKKRLALEKQKKIMQQFRDQQASFLAQNTDFDIGEDQTEDEVTTEEPEEEVKYHEHIRGNCLLCQEECNDQAPYGVIGIIQGSSLLRKTDVHSEIILDEIYSVPPNLDRESHSRPFGKKYDTVVFNRSKDRLLSAYPPGNNIRGVFVSGCGHLMHLGCFKNYYVARSMYRNDVTAGLSEYYYKYSTAKFFMCPLCRSLSNVLLPMPQIPKMCLNIDTLNFPRSMNGWLEEIGTMSSSSFEYQLVRSSLSDTKDTFRSCFLRPWINSKIISAMLARLKIADGALIDQSNNRDVSDLYDRYCETTKLAMKLVKGSTFTNVSPHDLLNSLAYTVSSLEVSQRCSPKQSGATRSVWFNELGPLTLSFLPTLSDTVLKCVCDQIIKSDQQALLLMESQKLLVCKIFYRHSQLKSMLRNGRMSDHDQIQPFLLSNTFDDFVKISSLMLIFGKQDNILYYVKLFYLSEICKTIISMIKVVADSSVVPDLTINYSQQSKSQFYILCKNVLLWCGSSNNIEILDDESNLLRLMSLVEKYSLPFLRRVALVLYCMFDISLEFNEFSNNEDDSELERLSKLIKVPPLQELYSQMSSDENNQILELIAGWCEHLAQNTWGDSTISLEYPGIYELVKLPHRLENLIDSMQESVCCMCHKTPILPAICMLCGSVICFNARQNTVSSRRLTGECNKHAATCTGSVGIFFITKACGILLLDSISNTGTIMPTPYLDIHGETDLQLRRGCPQFLNQKRYDFVVREQWLRQTVLQKMARHMDMTEMQNWRMA

SEQ ID NO: 2588 - protein, 252 aa, Saccharomyces cerevisiae
MSGAAAASAAGYDRHITIFSPEGRLYQVEYAFKATNQTNINSLAVRGKDCTVVISQKKVPDKLLDPTTVSYIFCISRTIGMVVNGPIPDARNAALRAKAEAAEFRYKYGYDMPCDVLAKRMANLSQIYTQRAYMRPLGVILTFVSVDEELGPSIYKTDPAGYYVGYKATATGPKQQEITTNLENHFKKSKIDHINEESWEKVVEFAITHMIDALGTEFSKNDLEVGVATKDKFFTLSAENIEERLVAIAEQD

SEQ ID NO: 2589 - protein, 551 aa, Saccharomyces cerevisiae
MSSGTENDQFYSFDESDSSSIELYESHNTSEFTIHGLVFPKLISVTSQDSEFDINEDEDGVDTIYEGMLDAPLTKNNKRILCEGSVPNLSYECLTTKGIFERMLQRVDHLQPIFAIPSADILILLQHYDWNEERLLEVWTEKMDELLVELGLSTTANIKKDNDYNSHFREVEFKNDFTCIICCDKKDTETFALECGHEYCINCYRHYIKDKLHEGNIITCMDCSLALKNEDIDKVMGHPSSSKLMDSSIKSFVQKHNRNYKWCPFADCKSIVHLRDTSSLPEYTRLHYSPFVKCNSFHRFCFNCGFEVHSPADCKITTAWVKKARKESEILNWVLSHTKECPKCSVNIEKNGGCNHMVCSSCKYEFCWICEGPWAPHGKNFFQCTMYKNNEDNKSKNPQDANKTLKKYTFYYRLFNEHEVSAKLDWNLGQTLGTKVHALQERIGISWIDGQFLSESLKVLNEGRTVLKWSFAVAYYSDASHNLTKIFVDNQMLLANAVESLSELLQIKTPEVIMKRRPEFYNKAGYVENRTTALMECGRELLCKGICKAAE

SEQ ID NO: 2590 - protein, 759 aa, Schizosaccharomyces pombe
MNFEEIEERDGVRFTWNVFPSTRIESSRTIVPIASIYKPLNERPDLPPVLYEPVTCKAPCKAVLNPYCHIDTRAKFWICPFCLQRNMLPPQYKDISNTSLPIELLPEYSTIEYTLPRPPQLTPVFLFVVDVCQDEENLQALKDSLIISLSLLPPECLVGLVTFGTMVDVYELGYTECSKSYVFRGSKDYTSKQIQEMLGLPTSNVSPVALQQARSFQGSAAPSRFLLPIQQCEFQLTNILEQLQPDSWPVANDRRPQRCTGTALNISVSMMESVCPNSGGHIMLFAGGPSTVGPGTVVSTELREPIRSHHDIERDQAKHVKKALRFYEGLTKRVSANGHAVDILAGCLDQIGIMEMKSLASSTGGYLVLSDSFTTSIFKQSFQRIFGRDSLNNMLLGFNATMEVLTTKELKISGLIGHAVSLNKKSQNVGDIEIGLGNTNSWKMCGISPKSTYAIYFEVATQSASAPQGDSRGLVQYLTLYQHSSNTFRLRVTTVARAFADGGSPLIVNSFDQEAAAVAMARIAAFKAEVDDGPDVLRWTDRMLIKLCQKFAEYRKDDPSSFRLSSQFTLYPQFMYYLRRSPFLQVFNNSPDETAFYRHMLNHEDVNNSLIMIQPTLQSFSFEHPGGVPVLLDAVSVKPDVILLLDTFFHILIFHGDTIAQWRNAGYQNQPEYQNLKELLEAPRVEAAELLIDRFPIPRFIVCDQGGSQARFLLSRLNPSETHNTTSMYGAPPAHAILTDDVSLQTFMSHLKKLAVAVS

SEQ ID NO: 2591 - protein, 148 aa, Saccharomyces cerevisiae
MSSSKRIAKELSDLGRDPPASCSAGPVGDDLYHWQASIMGPSDSPYAGGVFFLSIHFPTDYPFKPPKVNFTTKIYHPNINSSGNICLDILKDQWSPALTLSKVLLSICSLLTDANPDDPLVPEIAQIYKTDKAKYEATAKEWTKKYAV

SEQ ID NO: 2592 - protein, 671 aa, Schizosaccharomyces pombe
MENIRFEVQLTILHVEGLWKNGLLRSLKPYLLISVDDDQFIKTNVASGTLRLSWGFTQKLTVSPQSIILLQLFDEKQKNETSDGFVGLGAAVVNSFLPFNNPKDDYKTRITLRSPSGSYRGSVVCLFKRSKFLPEELPADKSQICTDIIDDASGCAWETRIDEFGHVYYLKSPQLSVISAISHEKLENLTPKQLKEVFSQFLFNNQSKSSLKINLEYKVIKHLLEHYPLALSVRQQVAVEKGPLPAGWEMRLSEDYHVYFVDHSTKTTTWSDPRDNVVASDSVSENTDSIQQINDEYQRKIAYMYDRPEMAVNDAQLQLKVSRATTFEDAYDIISKLSVSDMKKKLLIRFRNEDGLDYGGVSREFFYILSHAIFNPGYSLFEYATDDNYGLQISPLSSVNPDFRSYFRFVGRVMGLAIYHRRYLDVQFVLPFYKRILQKPLCLEDVKDVDEVYYESLKWIKNNDVDESLCLNFSVEENRFGESVTVDLIPNGRNIAVNNQNKMNYLKALTEHKLVTSTEEQFNALKGGLNELIPDSVLQIFNENELDTLLNGKRDIDVQDWKRFTDYRSYTETDDIVIWFWELLSEWSPEKKAKLLQFATGTSRLPLSGFKDMHGSDGPRKFTIEKVGHISQLPKAHTCFNRLDIPPYNSKEELEQKLTIAIQETAGFGTE

SEQ ID NO: 2593 - protein, 473 aa, Aspergillus terreus
MEGKGPSFKVIIVGASVTGLTLAHCLHRAGIDYVVLEKHHEVHPPIGAAVAILPNGGRIMEQLGIFRHIEDRCQPFQRVHLCFQDGFYYDSLSPSVVLKRFGLKFAALERTQLLEILYTHLPDKSRVLTSKGVVRITPHGNKMSVTTADGDEFQGDLVVGADGVHSVTRREMWRIANIEQPGLIPFKEQASMSVEFSCIFGMSNPIPGRKHWQHIIRIGPGFTFLIFPAAGDSLFWVLIEKLPHKYIYPDVPRFSQEDAVTRCEAAASQPVWQEVRFRDIWAQRRGFRMVALEENLFRTWHHGRIICIGDSISKMTPNIGQGANTAIEAAAGLANVIYAITQNHHQPSDDTIHRALANFSERHRKRLDAIHLESRWITRLEACQGWVVTAFTRYVAPHCGDLFALGVVRNSYNGEVLQFLPLTERSGKHWPKLEWWNTWGLSKWQEFGERLVYCFGVVILLWISWAVFNVNQL

SEQ ID NO: 2594 - protein, 965 aa, Schizosaccharomyces pombe
MTMVYSDNTSIITSAGGLMALLDEQERELQVHALLKIYEFIDQLWPEISDDVTKIEVMYEDHSFPERELAALVVSKVYYYLGEYDEALLFALSSGPKFLHDKNSDYKETLIFKCIDMFIHKSAELYKNPKADPLDERLSGVVEGIFQKCYAKNEWRHVLGIAIEAHRLDIIEYILNADKETDLKPYVLELAMTVVLDIEFRNRLLRLLLSSFLTETEPDYFSVGKCVVHLNDASVAAKLLMKLSSQNDDKSLLTAYQLAFDLEDSAPQEFLNSVMDLLPSPSVANSEEDANADSKKEDSSPCGYIIRILSGEQTVKYDREFLYAHNNTDMLILNRTKDSLEARNSVFHNAVTFANAFMNFGTSSDSFFRDNLSWLSKANNWSKFTATAALGVIHRGYYNQAMNILRPYLPEEDAPSSSTYSEGGAFYAMGLIHANHGRGVTEYLREQLKHTEDEIVQYGLLLGIGLTGMASRDETLYESVKTILFNDNAVAGSAAGISMGLIMLGTASSAAIDEMLQYAHETQHEKIIRGLGIGIALIVYGRQQEADGIIKELNNDLDPTLRYAGMFATALAYCGTSNSKIVRDVLHISVSDVNDDVRRAAVCALGFICFKDPNALISTVELLVDSYNPHVRYGSAIALGIACANSGSNAALDLLSRLVEDATDFVRQGAMIAQAMILTQHNDQLNSKVSGIRKHFEQVINEKHEDALAKLGATLAQGIIDAGGRNVTIALQTATGSLKLSAIVGLTVFLQYWYWFPLTHFMSLSFSPTALIGLDKNLNAPKFSFISNVRPKLFAYPPKSVQPTAKTVQKVETAVLSTTVKAQARAKRAEREKASKGSNDDEMKIDKKTTEEKEATPMEMDEEKSQDISINGNSKKEEPKSETLENFTRVVPAQLPYISFNLNGRYYPVRKFTGGVLMLIDRESDKAPDLIELNRDAVPASADTEPGEQEASPPEDFEYPFDDDD

SEQ ID NO: 2595 - protein, 1950 aa, Saccharomyces cerevisiae
MSVADDDLGSLQGHIRRTLRSIHNLPYFRYTRGPTERADMSRALKEFIYRYLYFVISNSGENLPTLFNAHPKQKLSNPELTVFPDSLEDAVDIDKITSQQTIPFYKIDESRIGDVHKHTGRNCGRKFKIGEPLYRCHECGCDDTCVLCIHCFNPKDHVNHHVCTDICTEFTSGICDCGDEEAWNSPLHCKAEEQENDISEDPATNADIKEEDVWNDSVNIALVELVLAEVFDYFIDVFNQNIEPLPTIQKDITIKLREMTQQGKMYERAQFLNDLKYENDYMFDGTTTAKTSPSNSPEASPSLAKIDPENYTVIIYNDEYHNYSQATTALRQGVPDNVHIDLLTSRIDGEGRAMLKCSQDLSSVLGGFFAVQTNGLSATLTSWSEYLHQETCKYIILWITHCLNIPNSSFQTTFRNMMGKTLCSEYLNATECRDMTPVVEKYFSNKFDKNDPYRYIDLSILADGNQIPLGHHKILPESSTHSLSPLINDVETPTSRTYSNTRLQHILYFDNRYWKRLRKDIQNVIIPTLASSNLYKPIFCQQVVEIFNHITRSVAYMDREPQLTAIRECVVQLFTCPTNAKNIFENQSFLDIVWSIIDIFKEFCKVEGGVLIWQRVQKSNLTKSYSISFKQGLYTVETLLSKVHDPNIPLRPKEIISLLTLCKLFNGAWKIKRKEGEHVLHEDQNFISYLEYTTSIYSIIQTAEKVSEKSKDSIDSKLFLNAIRIISSFLGNRSLTYKLIYDSHEVIKFSVSHERVAFMNPLQTMLSFLIEKVSLKDAYEALEDCSDFLKISDFSLRSVVLCSQIDVGFWVRNGMSVLHQASYYKNNPELGSYSRDIHLNQLAILWERDDIPRIIYNILDRWELLDWFTGEVDYQHTVYEDKISFIIQQFIAFIYQILTERQYFKTFSSLKDRRMDQIKNSIIYNLYMKPLSYSKLLRSVPDYLTEDTTEFDEALEEVSVFVEPKGLADNGVFKLKASLYAKVDPLKLLNLENEFESSATIIKSHLAKDKDEIAKVVLIPQVSIKQLDKDALNLGAFTRNTVFAKVVYKLLQVCLDMEDSTFLNELLHLVHGIFRDDELINGKDSIPEAYLSKPICNLLLSIANAKSDVFSESIVRKADYLLEKMIMKKPNELFESLIASFGNQYVNDYKDKKLRQGVNLQETEKERKRRLAKKHQARLLAKFNNQQTKFMKEHESEFDEQDNDVDMVGEKVYESEDFTCALCQDSSSTDFFVIPAYHDHSPIFRPGNIFNPNEFMPMWDGFYNDDEKQAYIDDDVLEALKENGSCGSRKVFVSCNHHIHHNCFKRYVQKKRFSSNAFICPLCQTFSNCTLPLCQTSKANTGLSLDMFLESELSLDTLSRLFKPFTEENYRTINSIFSLMISQCQGFDKAVRKRANFSHKDVSLILSVHWANTISMLEIASRLEKPYSISFFRSREQKYKTLKNILVCIMLFTFVIGKPSMEFEPYPQQPDTVWNQNQLFQYIVRSALFSPVSLRQTVTEALTTFSRQFLRDFLQGLSDAEQVTKLYAKASKIGDVLKVSEQMLFALRTISDVRMEGLDSESIIYDLAYTFLLKSLLPTIRRCLVFIKVLHELVKDSENETLVINGHEVEEELEFEDTAEFVNKALKMITEKESLVDLLTTQESIVSHPYLENIPYEYCGIIKLIDLSKYLNTYVTQSKEIKLREERSQHMKNADNRLDFKICLTCGVKVHLRADRHEMTKHLNKNCFKPFGAFLMPNSSEVCLHLTQPPSNIFISAPYLNSHGEVGRNAMRRGDLTTLNLKRYEHLNRLWINNEIPGYISRVMGDEFRVTILSNGFLFAFNREPRPRRIPPTDEDDEDMEEGEDGFFTEGNDEMDVDDETGQAANLFGVGAEGIAGGGVRDFFQFFENFRNTLQPQGNGDDDAPQNPPPILQFLGPQFDGATIIRNTNPRNLDEDDSDDNDDSDEREIW

SEQ ID NO: 2596 - protein, 194 aa, Schizosaccharomyces pombe
MESLLAVQGQDFVLTASSSSAVRGITVLKPDDDKSQILNSHNLMLYCGEAGDTTNFAEYIAANISLYTLRHNLNLSPEATASFTRKQLATSLRSRKPYQVNILLAGYETNLGKPELFWLDYLATCVRVPYACQGYSSFYCLSIFDRYYKPDLTIDEAVRIMKLCFDELKKRMPIDFKGFICKVVDKDGIREINI

SEQ ID NO: 2597 - protein, 399 aa, Coccidioides posadasii
MAPAADSPTLQPAQPSDLNQYRGYDHVHWYVGNAKQAATYYVTRMGFERVAYRGLETGSKAVASHVVRNGNITFILTSPLRSVEQASRFPEDEALLKEIHAHLERHGDGVKDVAFEVDCVESVFSAAVRNGAEVVSDVRTVEDEDGQIKMATIRTYGETTHTLIERSGYRGGFMPGYRMESNADATSKFLPKVVLERIDHCVGNQDWDEMERVCDYYEKILGFHRFWSVDDKDICTEFSALKSIVMASPNDIVKMPINEPAKGKKQSQIEEYVDFYNGAGVQHIALRTNNIIDAITNLKARGTEFIKVPETYYEDMKIRLKRQGLVLDEDFETLKSLDILIDFDENGYLLQLFTKHLMDRPTVFIEIIQRNNFSGFGAGNFRALFEAIEREQALRGTLI

SEQ ID NO: 2598 - protein, 926 aa, Schizosaccharomyces pombe
MSQEDAFYGKGSYGASSGNSNIPPQGFQPVYPVAGQLDNTAPYVGAVAEGTAEGIVSNGEYAVGAMGAAPTNIIGSVDQQPPVSHTSHKSRRQYPAEVFELTNTLAASPAPPSLSEPSYVMARTPSSSPYPHDRAEVGTKSLSAQFGGMSLGADGAAAMPTNELVSVDLYNQTPEISDLTSPPPPINLPLSYSATGAATSNCPPKYVRSTINCVPTTNSLLKKSKIPFALVIRPYTSLVEEDDPVPVVTDTIISRCRRCRMYINPFSIFIDNGHRYRCNSCGIVNEVPQSYDWDSFRNVQRDRWQRPELNYAVVDFIAPQEYMVRAPQPLVYVFLIDISFVSISSGMVGTASRAILESLDRIPNKEGRAKVAFIGVDSALHFFSVSPGAEEATQLVVSDLEEPFLPRNQDLLLNLRECRQGIENLLERFQSMFATTRDSSNALGPGLKAAHRLIENIGGKICCLISSLPNVGVGKLELREDPKLLGTNRESSLLHPNDSFYKSFAVECSTSQVSVDMFLFSSQYQDVATLSCLPRYTSGKTQFYHRWNASRSEDALKFASELTNYLSMEIELEAVMRVRGSNGLRMSSFYGNFFNRSSDLCAFPSFPRDQSYVVEVVIEDTITKPFVSFQTAMLHTTCNGERRIRVLTISLPTTNSMTDLYASADQVAIAQYLTVRASEKALSSTLNEARDSIISKLVEILEVYKKNLAGQNTGAAIPLQISTNLRLLPLLCLALTKHTGFRRSSHISSDLRSIALCYLSTLPTPLLMRYIYPTLYSLHDMPIEAGTVTEQGVVLPSALNLTSALLQSFGLYLVDTHIHQFLYIGKDAVPQLLIDAFGVNSLADLKAGRFTMPVIDNPLNVRINAILGKLRSLDKGSTIMPSLYLVRGDGDPQLRSWFFSHFVEDRSENSPSYLQFLQTLKEKVRD

SEQ ID NO: 2599 - protein, 1872 aa, Saccharomyces cerevisiae
MEDSDLSITNIRDFLTELPKLAKCEYSETTSYLLWKTLNLRLKHSDNDINWRSLVSILNSEAWENEKYRDILNGRKWRTLEFENDHHSVGNMHIGTACTRLCFPSETIYYCFTCSTNPLYEICELCFDKEKHVNHSYVAKVVMRPEGRICHCGDPFAFNDPSDAFKCKNELNNIPISNDNSNVTDDENVISLLNYVLDFLIDVTVSYKEEAEAHSSERKASSLMHPNQNSITDDIMEKHECEPLVNDENFVFFDNNWSNTRKEAHMEWAIQIEEEECNVHYMDLASTITRILNTPVEYAISITKALEDSHDVVTVLQSENFFEIDQIAKEFQKENIVVHVRKADDIFKRKLTDDLTDWLYSLCFKAATSLQNKYALRISMLDVWYSHFSKMRVSPTNTNPDFSKINLLGGFLISNEDSDESWFKPWSLENIEDERISKILTNYNERLIRAHSPNTVSHFYNFYGSRFQYIIINSINILSKKSKFKMLKIMASLFSLRDESRKFLAAQYIDVYLSVLYDAVASDAKECQVTLMSILGQYTFQDPSIANMTISSGFIERTIRFAFTLMAFNPEDLMSYLPISLYNGFKLPTETIRNRRTIICFKDLCTIMSANTVPEELLSNEAIFNAIIESFSEFSNVLPLKRETKEHVEVENFDFSAFYFFFSSILIMTDGYTRSISLVKDAAFRKQIVLKLLDVAQTREFESLTNSRKAISPDNASTNENDSNKATLSTVRETICNYVAETINFQVGVNTQYFFNPMSYLFKFVIQWSQCGRYEPIPASLTNYINLFEVFQDKQKALYISESALSTLVLIGQINVGFWVRNGTPITHQARMYTKYSMREFTYISDIFNVQFSMAMCNPDELMVTYLSRWGLKHWANGVPMYDYPDTETTVAVVNECILLLIQLLTEVRSLVMKSSKEGFERTFKSEIIHALCFDTCSYAQIVNCIPEHITKHPSFDIYLEKYANYTSPVSLTDNGIFVLKEKYKDEIDPYYIGLSSSRRYDVEKNIRLNMANLKKMKYEDTFVPAKKVKDLLKNTLFSGLYSISSVNTFGLFLKNTLDHIIKYDYDNLLPRVVHLIHLCVVNNLNEFMGILWHEYAIVDTEFCHYHSIGSILYYCLLKDNFSESHGKIREIFRYLMETAPHVNVNSYLREQTTSYTPGILWPTKEDKSHKDKEFERKKHLARLRKKKLMKKLAQQQMKFMENNSVDTSDISTPRTTSPSLSPTRINAENSSNTINSCCDDDCVFCKMPKDDDVFVYFSYQERNICDHGIDFTNPTDVNRINSLFSGKQTKDSAIQENPQDDDGTRLKFTSCEPVLRACGHGSHTKCLSGHMKSIRGIQNQTTKNIPLSYGSGLIYCPVCNSLSNSFLPKTNDIDKRTSSQFFMCIEKRSEAEENLDPMSSICIKAAMILGDLQGKKVTTIEDAYKVVNSVFINTISNTELRLRSHKKEGKIVNMERISSQCILTLHLVCELKSFIYKKFVNSKTFSSEISRKIWNWNEFLIKGNNVNLLLYMSQNFDNIDGGKTPQPPNLCIYEMFKRRFHQLLLLLARDMMRVNFYKDCRNKIKISSNGSEEPSTSFSYLFNTFKKYVDLFKPDDVRFDFTSLEKIKDFICSLLLESLSIFCRRTFLLFNIQYDDDGDGDNNNNRSNNFMDVKQREIELIFRYFKLPNLTHFLKDFFYNELTQNIERYNDGNDNLRIQQVIYDMVQNINTRAYPSPEHIQLIELPLNLSKFSLDNDEISNKCDKYEIAVCLLCGQKCHIQKSIALQGYLQGECTDHMRNGCEITSAYGVFLMTGTNAIYLSYGKRGTFYAAPYLSKYGETNEDYKFGTPVYLNRARYANLANEIVFGNMIPHIVFRLTDGSADLGGWETM

SEQ ID NO: 2600 - protein, 786 aa, Schizosaccharomyces pombe
MEQGAKRVRFYIVAADGLSKRDLFRQPDPFAILTVDGEQTHTTKVIKKSVNPYWNEGFEVTVKPSSVISIRLFDQKKFKKKDQGFLGLVSFRMREVGSFRSNREVSLTRPLKKSSTTNLSVLGNLVLKVAPSKIRAPAGNHSSTTANRTTSTPTTTTARTTRTTPRPTATTNTSNQSTSNSTRNGTSAATSNGTGTGAGTGASHRSSPVTNRQTNNTSALSNSNAHIMSSFEDQYGRLPPGWERRADSLGRTYYVDHNTRTTTWTRPASSTNPVHNTSSDSQRLNHQNRHLPDDSNPSLMQSDSGNDLPFGWEMRYTDTGRPYFVDHNTRTTTWVDPRNPLVRPNGGSSTVGSLMQPQSLSHLGPLPSGWEMRLTNSARVYFVDHNTKTTTWDDPRLPSALDQDVPQYKCDFRRKLIYFRSQPGMRPLPGQCNVKVRRDHIFEDSYAEIMRYSAHDLKKRLMIRFDGEDGLDYGGLSREFFFLLSHKMFDPIYCLFEYSAVDNYTLQINPHSSINPEHLNYFRFIGRVIGLAIFHRRFLDAFFVVSLYKKLLRKKVSLADMESIDAEFYRSLKWVLENDITGILDLTFSVEEDHFGEVRTVELITNGENIEVTEENKKKYVDLVTEWRVSKRVEQQFNAFYSGFVELVSPDLVNVFDERELELLIGGISDVDVEDWKSHTEYRTYIATDPVIKWFWEIIAGWKNEDRSKLLQFATGTSRIPVNGFRDLQGSDGPRKFTIEKAGTPDQLPVAHTCFNRLDLPDYPSKDTLHEKLSLAVENTVGFGNE

SEQ ID NO: 2601 - protein, 348 aa, Aspergillus terreus
MALSAYFLLCLSVLGLDAIYGFGFRNGFLELMANSYRERKLSGTAEPLQGNITGTGLDELLGNLIVFYWPVLDGNHPGLSLQAFHFLGAIVAVWVAIQVQSWRSPNRNSLLRSPTLFAMLSQVVAIAVIVPLWCAISIWSSSSPRPITRAVSASAAHSIRLIPISMVLGFGIPTIGMLLPESTHQNLFSKQIAIAVWQIWPIYVALWHWGLRVLFRSRLKEGISVRTACRTACSFAFVCAIIPHAVSWGLSLTLIPTNLLADVLPWQFAGGGTVQVQSMAQGGLWFLQWDHLIGMGSFLLWAMHMRWTVEQQSSFLQTCYLALKVGVLCLISGPCGAAVWLLWEESQF

SEQ ID NO: 2602 - protein, 497 aa, Schizosaccharomyces pombe
MIDDQRDMQVDSVNQEENVDSGETKQNTVTEVPRTVLQDVEANIAALMQATKQRDPRLVYRSLRTTSNICHRLNADVLGQLIKKYYSFDNSLKNELLELIDMPQNGDDSSTSITNGNGNTIFPEVDMYLQLLLSMTLYYNEKYEVGAEYIKKVIARLQSYDRRTLDQIAAKLYFYYILFFEKCNRSVECRNTLLSVHRTASLRHDSETQAMVLTLLLRNYIQFNLYDQADRLVSKTSFLTNASNNLAIRYQYYLGRIRAIQLDYTTAHEHLVSAIRKAPNTVYAVQFLEAVYKLHIVVQLLMGEIPERRIFRQKSLEKTLVPYLRISQAVRIGDLCAFTDALSKYEAEFRFDGLYTLICRLRHTVIKTGLRMISLSYSRISLRDVCIKLGLDSEESAEYIVAKGIRDGVIDASIDHSNAFMASNEAMDIYSTEQPQQAFHERIQFCLALHNDSIKSMRYPMDAHKSELEGVEEARRRMDKEMAEADLDDDEPDLGEF

SEQ ID NO: 2603 - protein, 1483 aa, Saccharomyces cerevisiae
MSENNSHNLDEHESHSENSDYMMDTQVEDDYDEDGHVQGEYSYYPDEDEDEHMLSSVGSFEADDGEDDDNDYHHEDDSGLLYGYHRTQNGSDEDRNEEEDGLERSHDNNEFGSNPLHLPDILETFAQRLEQRRQTSEGLGQHPVGRTLPEILSMIGGRMERSAESSARNERISKLIENTGNASEDPYIAMESLKELSENILMMNQMVVDRIIPMETLIGNIAAILSDKILREELELQMQACRCMYNLFEVCPESISIAVDEHVIPILQGKLVEISYIDLAEQVLETVEYISRVHGRDILKTGQLSIYVQFFDFLTIHAQRKAIAIVSNACSSIRTDDFKTIVEVLPTLKPIFSNATDQPILTRLVNAMYGICGALHGVDKFETLFSLDLIERIVQLVSIQDTPLENKLKCLDILTVLAMSSDVLSRELREKTDIVDMATRSFQHYSKSPNAGLHETLIYVPNSLLISISRFIVVLFPPEDERILSADKYTGNSDRGVISNQEKFDSLVQCLIPILVEIYTNAADFDVRRYVLIALLRVVSCINNSTAKAINDQLIKLIGSILAQKETASNANGTYSSEAGTLLVGGLSLLDLICKKFSELFFPSIKREGIFDLVKDLSVDFNNIDLKEDGNENISLSDEEGDLHSSIEECDEGDEEYDYEFTDMEIPDSVKPKKISIHIFRTLSLAYIKNKGVNLVNRVLSQMNVEQEAITEELHQIEGVVSILENPSTPDKTEEDWKGIWSVLKKCIFHEDFDVSGFEFTSTGLASSITKRITSSTVSHFILAKSFLEVFEDCIDRFLEILQSALTRLENFSIVDCGLHDGGGVSSLAKEIKIKLVYDGDASKDNIGTDLSSTIVSVHCIASFTSLNEFLRHRMVRMRFLNSLIPNLTSSSTEADREEEENCLDHMRKKNFDFFYDNEKVDMESTVFGVIFNTFVRRNRDLKTLWDDTHTIKFCKSLEGNNRESEAAEEANEGKKLRDFYKKREFAQVDTGSSADILTLLDFLHSCGVKSDSFINSKLSAKLARQLDEPLVVASGALPDWSLFLTRRFPFLFPFDTRMLFLQCTSFGYGRLIQLWKNKSKGSKDLRNDEALQQLGRITRRKLRISRKTIFATGLKILSKYGSSPDVLEIEYQEEAGTGLGPTLEFYSVVSKYFARKSLNMWRCNSYSYRSEMDVDTTDDYITTLLFPEPLNPFSNNEKVIELFGYLGTFVARSLLDNRILDFRFSKVFFELLHRMSTPNVTTVPSDVETCLLMIELVDPLLAKSLKYIVANKDDNMTLESLSLTFTVPGNDDIELIPGGCNKSLNSSNVEEYIHGVIDQILGKGIEKQLKAFIEGFSKVFSYERMLILFPDELVDIFGRVEEDWSMATLYTNLNAEHGYTMDSSIIHDFISIISAFGKHERRLFLQFLTGSPKLPIGGFKSLNPKFTVVLKHAEDGLTADEYLPSVMTCANYLKLPKYTSKDIMRSRLCQAIEEGAGAFLLS

SEQ ID NO: 2604 - protein, 198 aa, Saccharomyces cerevisiae
MDIILGIRVQDSVILASSKAVTRGISVLKDSDDKTRQLSPHTLMSFAGEAGDTVQFAEYIQANIQLYSIREDYELSPQAVSSFVRQELAKSIRSRRPYQVNVLIGGYDKKKNKPELYQIDYLGTKVELPYGAHGYSGFYTFSLLDHHYRPDMTTEEGLDLLKLCVQELEKRMPMDFKGVIVKIVDKDGIRQVDDFQAQ

SEQ ID NO: 2605 - protein, 139 aa, Schizosaccharomyces pombe
MAKVPRNFKLLEELEKGEKGLGESSCSYGLTNADDITLSDWNATILGPAHSVHENRIYSLKIHCDANYPDAPPIVTFVSRINLPGVDGETGKVNPHKIDCLRHWKREYSMETVLLDLKKEMASSSNRKLPQPPEGSTFF

SEQ ID NO: 2606 - protein, 768 aa, Saccharomyces cerevisiae
MDFETNEDINGVRFTWNVFPSTRSDANSNVVPVGCLYTPLKEYDELNVAPYNPVVCSGPHCKSILNPYCVIDPRNSSWSCPICNSRNHLPPQYTNLSQENMPLELQSTTIEYITNKPVTVPPIFFFVVDLTSETENLDSLKESIITSLSLLPPNALIGLITYGNVVQLHDLSSETIDRCNVFRGDREYQLEALTEMLTGQKPTGPGGAASHLPNAMNKVTPFSLNRFFLPLEQVEFKLNQLLENLSPDQWSVPAGHRPLRATGSALNIASLLLQGCYKNIPARIILFASGPGTVAPGLIVNSELKDPLRSHHDIDSDHAQHYKKACKFYNQIAQRVAANGHTVDIFAGCYDQIGMSEMKQLTDSTGGVLLLTDAFSTAIFKQSYLRLFAKDEEGYLKMAFNGNMAVKTSKDLKVQGLIGHASAVKKTDANNISESEIGIGATSTWKMASLSPYHSYAIFFEIANTAANSNPMMSAPGSADRPHLAYTQFITTYQHSSGTNRIRVTTVANQLLPFGTPAIAASFDQEAAAVLMARIAVHKAETDDGADVIRWLDRTLIKLCQKYADYNKDDPQSFRLAPNFSLYPQFTYYLRRSQFLSVFNNSPDETAFYRHIFTREDTTNSLIMIQPTLTSFSMEDDPQPVLLDSISVKPNTILLLDTFFFILIYHGEQIAQWRKAGYQDDPQYADFKALLEEPKLEAAELLVDRFPLPRFIDTEAGGSQARFLLSKLNPSDNYQDMARGGSTIVLTDDVSLQNFMTHLQQVAVSGQA

SEQ ID NO: 2607 - protein, 961 aa, Saccharomyces cerevisiae
MTAIEDILQITTDPSDTRGYSLLKSEEVPQGSTLGVDFIDTLLLYQLTENEKLDKPFEYLNDCFRRNQQQKRITKNKPNAESLHSTFQEIDRLVIGYGVVALQIENFCMNGAFINYITGIVSNVNSYTDFLSQIIQRAILEGTALDLLNAVFPTLLEYCNKHVSHFDLNESVIYNNVLTIFELFVTFKPIAEIFTKIDGFFADYSCKPQDFERKTILGPILSLSPIEAAVAIRNYGDNLLRSKQQTAMIHESLQAEHKVVIDRLFFIVDKLVRGSLNSRTDMISYFAHIANKNHLRRADHPPFKELSSNGFMSNITLLLVRFSQPFLDISYKKIDKIDANYFNNPSLFIDLSGETRLNSDFKEADAFYDKNRKTADSKPNFISDCFFLTLTYLHYGLGGTLSFEEKMGSEIKALKEEIEKVKKIAANHDVFARFITAQLSKMEKALKTTESLRFALQGFFAHRSLQLEVFDFICGASTFLIRVVDPEHEFPFKQIKLPLIPDQIGVENVDNADFLRAHAPVPFKYYPEFVVEGPVNYSLYISKYQTSPIFRNPRLGSFVEFTTMVLRCPELVSNPHLKGKLVQLLSVGAMPLTDNSPGFMMDIFEHDELVNKNLLYALLDFYVIVEKTGSSSQFYDKFNSRYSISIILEELYYKIPSYKNQLIWQSQNNADFFVRFVARMLNDLTFLLDEGLSNLAEVHNIQNELDNRARGAPPTREEEDKELQTRLASASRQAKSSCGLADKSMKLFEIYSKDIPAAFVTPEIVYRLASMLNYNLESLVGPKCGELKVKDPQSYSFNPKDLLKALTTVYINLSEQSEFISAVAKDERSFNRNLFVRAVDILGRKTGLASPEFIEKLLNFANKAEEQRKADEEEDLEYGDVPDEFLDPLMYTIMKDPVILPASKMNIDRSTIKAHLLSDSTDPFNRMPLKLEDVTPNEELRQKILCFKKQKKEEAKHKASE

SEQ ID NO: 2608 - protein, 501 aa, Schizosaccharomyces pombe
MDFPGLIKKIKEDLENRLVEKSKQPAFTDYWLINKTISLLKEYPSGFSYPILINEIELACSERNKLDNVFSSLEWLTKSDAVIYLEDQFHFHCYDYYYTPIPSLKLKDSEENTCEMILHSSFYLLFHEPFNILKGSTLRFSQSRIHQKWYLRKQIRFLPTTSFVPVLQYAASKSFVKSMVESTEHEFFQIRDITISKSDQGVKRITVELGRIISLDKKGAFLIDNNTNFIHFSGTYHDFPKLLDKQQYLLIPFWSTVWEGSTNWQDGMIGILVILSENDFEEKKCDSWQVGRLAAVNSNFLVLDNNGQRVKILYSNSQKHYFKDTYIGDLLCISPINHSSDNLSDYSCVSDTTTEILSNLENPLSSNFLRNDLCKFSNLFSGVSGHLKIQPLTLVITGFVANLTRQSDLNTSLVLPEVNPLTAKMEVIDCLRNSFWAALRPNCVSYFASMISGFKELFQKEMEFPIYLDLKSYKLGFHWCDIYVDSEHNCHIQKINSLPCE

SEQ ID NO: 2609 - protein, 767 aa, Schizosaccharomyces pombe
MTTLNTNDKDLPIVKKYDSLNGTWDFLKTGVSQIFERLDEGMTITKYMELYTAIHNYCADASKTITVDNFNDQTANVLGEALYNNLVLYLEEYLARLRKECISQTNHEEQLAAYAKYWTRFTTSARFINHLFGYLNRYWVKLKNRFTETLVYDIYTLCLVSWHHHVFSHIRDSLLQNLLYMFTKKRLYEPTDMKYVEVCVDSITSLSFDKTDMTKPNLSSYKTFFETNFIENTKNFYAKESSEYLASHSITDYLKKAEIRLAEEEELVRLYLHESTLKPLLEATEDVLIAQHEEVLHNDFARMLDQNCSEDIIRMYRLMSRTPNGLQPLRQTFEEFVKRSGFAAVAKIVPQVGGEADVDPKEYMEMLLSTYKASKELVNTAFHGDTDFTKSLDTAFRELVNRNVVCQRSSSRSPELLAKYADSILRKSNKNVDIDDVEDCLSSIIIIFRYVEDKDVFQNFYTKLLAKRLVNGTSNSQDAESSMLSKLKEVCGFEYTSKLQRMFQDISLSQEITEAFWQLPQSRAGNIDFSALVLGTSFWPLSPNNVNFHLPEELVPLYEGFQNYYYSCHNGRKLSWLFHLSKGEIKARINPQTNVTYVFQVSTYQMGVLLLYNHRDSYTYEELAKITGLSTDFLTGILNIFLKAKVLLLGDNDKLGDPNSTYKINENFRMKKIRVQLNLPIRSEQKQESLETHKTIEEDRKLLLQSAIVRIMKARRTLKHVVLVKETIDQIKSRFTPKVSDIKQCIDMLIEKEYLERQGRDEYIYLA

SEQ ID NO: 2610 - protein, 409 aa, Schizosaccharomyces pombe
MCSPSATLTHRTMTEKARTVSDLTISQAIFELSSPFLENKSQKALDTLFSAIRDHDLAPLYKYLSENPKTSASIDFDSNFLNSMIKKNEEKLAEFDKAIEDAQELNGEHEILEAMKNKADYYTNICDRERGVQLCDETFERATLTGMKIDVLFSKIRLAYVYADMRVVGQLLEKLKPLIEKGGDWERKNRLKAYQGIYLMSIRNFSGAADLLLDCMSTFSSTELLPYYDVVRYAVISGAISLDRVDVKTKIVDSPEVLAVLPQNESMSSLEACINSLYLCDYSGFFRTLADVEVNHLKCDQFLVAHYRYYVREMRRRAYAQLLESYRALSIDSMAASFGVSVDYIDRDLASFIPDNKLNCVIDRVNGVVFTNRPDEKNRQYQEVVKQGDVLLNKLQKYQATVMRGAFKV

SEQ ID NO: 2611 - protein, 1958 aa, Schizosaccharomyces pombe
MLQDESSRSLPRSALIRRRLSLFLQSHALMYSFLWSESAKKSLLNEVFSALLGYDHTLWNTLLPERPTIDASFLLRRAQGHSEGDEYRHGTCESKCGHIFRKGEVFYRCKTCSVDSNSALCVKCFRATSHKDHETSFTVSAGSGGCCDCGNAAAWIGDVSCKIHSHEEDATISNDMIDEIPEKLENSIQTTIDCVLDFVLDVFSCSPENLKKMPTLESILQDEKTSRLSENKYGDIDDSCNMYSLVLWNDEKHSFKQFYEQITTALELPNNVFGKKMANIINDIGRACIVTETNIKELLKIGQKLAQINLAVSIRSMRDIFREESCAVLLEWLADIAGSSICGKRNYFSSVICKELVRPWNCGLHNSDLTFRLSLRSLALPEIVAIDSPDIFLNEDHINSSGPSDTSSHMLETDESSIHSRHWYPSNSLPDVLSYASRVRFDYFFLYDLKLWKSLRYKLQELYLGYFITQPGFKEIMGARIAISYRRLAELFLLLDREPEHSVIFFSMQIFTVADVAKLLVTEYDFLTTINATLYTFFTYKKLNTPNYVDQHAMIRTDSAAFHSRRYIHIFHHIQFMLSIPCVAEIVREDLKFLKQYADFFNLFQGMCPYTRAVSQHVEWENDSWMYVLNVSLQVAKLCRHVGNVFMELNTNKLANAINYLISLILYPKARNESWTNTESLTTGITVDERGNSKLIEYDIALQPVSFHHPLHWLLVYLLSFYVERDNYKLLWTQLDLLAVTDHPLRVCAWLSQMRAKLWIRNGTTLRDQAHHYRNLSFHEYTFDLDVLLLQLTLTYGDPDAILPSFISRFQLEDQMYGRFFVPHKHYDVSQVTIMMEEFLLLLISIVCNTAVLDHWDITRRIEYGIAHILCFRPLPYSEITKRTCEHLLEHKQFESTLKKVATFRNAEGINDSGSFTLKDEYFDYVDPFNIHYSRNQREEAENILRRRYSKQHSKHLESVVYEEYHPILHSNITIPILQSDSFVGILWHTIVYAYIYPYDQGKLEGLVNTALHACLLVLMSEKGSEPIFSKKICENRFPVVEGLQEYCNSPDVTLFSVLCQMKNHRNFVYVKEKISLIMKILKSEVPLLYEPVYAETLSISSSKIVQSLSDAEQQEQHLAKVRMAKERQARIMEQFRMQQNKFLENHALFEASDCEMDEADEFSVTSSVSTKLFLDPPIDTCLLCQEELKDKRPYGTLVFVLRSSVLRLFPADDANYVSEVLDIPDSLDHEIQERPFGLAGKRKKVLDSTEAYDYDNYYYEKKGNELHQLKDSFNGFPPDQLDRGLHATGCGHFMHIDCFKNHIATVTLATRANPYRNHPHNLSMKEFLCPLCKALCNTIFPILWRPKEEINFQEAGVLTAPLKNWLVSKTFSFNKDLNQQLLDIETSPSEHTQSYNLNLLDVLQHTLRDSLKDIYTLNTGADNSSDNVEENADNLFQSSVLDHVHFKSVVNNEVPADERLAISDDIFELYRRLDDVIDLNSSLYSDDFIPVNGKLHNVVKLFSYSLCQVEASTRGHIKCSSIPADIWVHNLGKNQQVFLRILSESIKTYTLLCAHDSQKRIGGSIQEFEFISFCQQKRIFGRLLPSLDSPVTKSITDDRVEPLLVKDTFREFAEASVSGLLSCDESFHYLTQLYYTADIVRNLWILLSQRNSLLKCMESVEFEAFDYEQLKGFEHLVIQIWKSLRVDGAGLINFDCCTEDDLNNPHLLFTLYKLLERFSLIFLRKCALLWYCRYGVSFETQPNLNFQNSELSRLQTKMHIPGVIELSNHLCLTASSTEWSLIKHWCNFFTETGPLCDFPRAYYPGIYELVSLPYELDKVFELLLARRCSKCLTEPMEPAICLFCGKLLCFQSHCCSFNGIGECNLHMQQCASDIGIFLIVKKCAILYLNPPVGSFSVAPFLDAYGETDLGLRRGRSQYLSQKRYDETVRTMWLNGSIPSYIARQLDANPDTGGWETL

SEQ ID NO: 2612 - protein, 272 aa, Schizosaccharomyces pombe
MNSIVSKYTQSTNNDDPKKIIEEEGFTNRFDVVPVPQSSLYLRNLTDETKNKHCLIKMNHGTTTLAFRYQHGIVVCVDSRASAGPLIASQTVKKVIEINPYLLGTLAGGAADCQFWETVLGMECRLHQLRNKELISVSAASKILSNITYSYKGYGLSMGTMLAGTGKGGTALYYIDSDGTRLKGDLFSVGSGSTFAYGVLDSGYRWDLSKQEALYLAQRSIVAATHRDAYSGGSVNLYHIDENGWVFHGNFDVDSLIWEAKDNENSFAHIPR

SEQ ID NO: 2613 - protein, 273 aa, Aspergillus flavus
MRFSAIFTLGLAGTALATPLVERAGSSPTDIISGISDKTDALDSAIKAYNGGDPSKVESASADLISTITKGTDAIKSGDDISTTDALALPEPVQALTKKVEQAIDDIIAKKDKFVEAGAGGKVKDSLNQQKSAADGLASAITSKVPESLKEIAQSLSAGISTAIQKGVDAYKDVSDSAPSSSAGSSASATATGSASETGSASTTGSASATSSSVIPTSSGAASSSAAPSGSSTPTGSGSASATSPPLATGAANKATIGYSLGAVAMAAIAVAV

SEQ ID NO: 2614 - protein, 150 aa, Schizosaccharomyces pombe
MQIFVKTLTGKTITLEVESSDTIDNVKSKIQDKEGIPPDQQRLIFAGKQLEDGRTLSDYNIQKESTLHLVLRLRGGGKKRKKKTYTTPKKIKHKHKKVELAVLKYYKVEDDGSVKRLRRECPNCGASTFMANHKDRLYCGRCHLTLKLEA

SEQ ID NO: 2615 - protein, 470 aa, Candida albicans
MRFSTLHFAFLATLSSIFTVVAASDTTTCSSSKHCPEDKPCCSQFGICGTGAYCLGGCDIRYSYNLTACMPMPRMSTFQESFDSKDKVKEIELQSDYLGNSTEADWVYTGWVDYYDNSLLIQMPNHTTGTVVSSTKYLWYGKVGATLKTSHDGGVVTAFILFSDVQDEIDYEFVGYNLTNPQSNYYSQGILNYNNSRNSSVNNTFEYYHNYEMDWTEDKIEWYIDGEKVRTLNKNDTWNETSNRYDYPQTPSRIQFSLWPGGDSSNAKGTIEWAGGLINWDSEDIKKYGYYYAHIKEIYATAYDIPNDVKLDGNSTKESDYHAFLYNSTDGDASNIMLTTKKTWLGSDDATGFDPQNDDEDSSSNKAQETTITSVSGSSTITSVKTDSTKKTANVPAQNTAAAAQATAKSSTGTNTYDPSAGVGGFVQDSKSTDSGSSGSSSQGVANSLNESVISGIFASICLGILSFFM

SEQ ID NO: 2616 - protein, 181 aa, Saccharomyces cerevisiae
MVVSIIPQFPDIKVSLALFEQVKNAKEIRSKMSELSTSFAFIDPRLVCSGEQMYSAIYKTLIEVKYNKMRTRNLNSECVLCLSPTSNISDAFLKFGIKDDSSQLICLKFHTNTDDVDKEQLRTIMTSIVKGQEIEFNDDNLSRFYDEALIRKIYKLSDDFKPQDVNGLSRALVDAIQLRGV

SEQ ID NO: 2617 - protein, 327 aa, Saccharomyces cerevisiae
MSFRPGSRGGSRGGSRGGFGGRGGSRGGARGGSRGGFGGRGGSRGGARGGSRGGFGGRGGSRGGARGGSRGGRGGAAGGARGGAKVVIEPHRHAGVYIARGKEDLLVTKNMAPGESVYGEKRISVEEPSKEDGVPPTKVEYRVWNPFRSKLAAGIMGGLDELFIAPGKKVLYLGAASGTSVSHVSDVVGPEGVVYAVEFSHRPGRELISMAKKRPNIIPIIEDARHPQKYRMLIGMVDCVFADVAQPDQARIIALNSHMFLKDQGGVVISIKANCIDSTVDAETVFAREVQKLREERIKPLEQLTLEPYERDHCIVVGRYMRSGLKK

SEQ ID NO: 2618 - protein, 983 aa, Saccharomyces cerevisiae
MTSTTGLRNLTLSFKKQLTTSTRTIMTIGDKQKWTATNVRNTFLDYFKSKEHKFVKSSPVVPFDDPTLLFANAGMNQYKPIFLGTVDPASDFYTLKRAYNSQKCIRAGGKHNDLEDVGKDSYHHTFFEMLGNWSFGDYFKKEAITYSWTLLTEVYGIPKDRLYVTYFEGDEKLGLEPDTEARELWKNVGVPDDHILPGNAKDNFWEMGDQGPCGPCSEIHYDRIGGRNAASLVNMDDPDVLEVWNLVFIQFNREQDGSLKPLPAKHIDTGMGFERLVSVLQDVRSNYDTDVFTPLFERIQEITSVRPYSGNFGENDKDGIDTAYRVLADHVRTLTFALADGGVPNNEGRGYVLRRILRRGARYARKYMNYPIGNFFSTLAPTLISQVQDIFPELAKDPAFLFEILDEEEASFAKTLDRGERLFEKYASAASKTESKTLDGKQVWRLYDTYGFPVDLTELMAEEQGLKIDGPGFEKAKQESYEASKRGGKKDQSDLIKLNVHELSELNDAKVPKTNDEFKYGSANVEGTILKLHDGTNFVDEITEPGKKYGIILDKTCFYAEQGGQEYDTGKIVIDDAAEFNVENVQLYNGFVFHTGSLEEGKLSVGDKIIASFDELRRFPIKNNHTGTHILNFALKETLGNDVDQKGSLVAPEKLRFDFSHKKAVSNEELKKVEDICNEQIKENLQVFYKEIPLDLAKSIDGVRAVFGETYPDPVRVVSVGKPIEELLANPANEEWTKYSIEFCGGTHVNKTGDIKYFVILEESGIAKGIRRIVAVTGTEAFEAQRLAEQFAADLDAADKLPFSPIKEKKLKELGVKLGQLSISVITKNELKQKFNKIEKAVKDEVKSRAKKENKQTLDEVKTFFETNENAPYLVKFIDISPNAKAITEAINYMKSNDSVKDKSIYLLAGNDPEGRVAHGCYISNAALAKGIDGSALAKKVSSIIGGKAGGKGNVFQGMGDKPAAIKDAVDDLESLFKEKLSI

SEQ ID NO: 2619 - protein, 513 aa, Schizosaccharomyces pombe
MESQPVIWYCHSCSNEFQRPGNCPRCNSDFVEMVEPNTAPEDDPRAANFVNATEFNDPNAMLQNILQSLGQGVVPNVNPTDANRTANPNTNSNPNPNATNAQPNPTMFSTGQFSTEQGLPNVFFGAAAAQPGSGTPFVMPGIVNAAQIRNFFQNIMGGNAPQPEANSEQARNANTETSNPPFASAQTQGQEHRPSSPNPAEHMTGAYVNTPLNQPPSYAASTQPEFQQTTSPIFSSSSTPPPPPPRPSQPTSGESQNTNPRFPFSAQSFVFSVGPNGALHQVNTSTENPQNAQAGAIPITDLGSILERIFGSLNQPGAQQGEGEPFNPANMFSNIFNLSGNPGDYAWGARGLDDIISQLMEQAQGHNAPAPAPEDVIAKMKVQKPPKELIDEEGECTICMEMFKINDDVIQLPCKHYFHENCIKPWLRVNGTCAICRAPVDPNSQQRNNTSTDSANGHNPSNHANPSTSTTNDQGATLRNESFNAASQSNLSSEHGHSSRTPMDDFVDEEPLE

SEQ ID NO: 2620 - protein, 204 aa, Schizosaccharomyces pombe
MSIMEYNGGSCVAMAGKNCVAIASDLRLGVQSISLTNNFPKVFAMGDKTYLGLTGLATDVQTLYELFRYKVNLYKFREERQIQPKTFANLVSSTLYEKRFGPYFSFPVVAGVSNDNTPFICGFDSIGCIDFAEDFIVSGTATEQLYGMCESVYEPNLEPDDLFETISQALLNAQDRDCISGWGCVVYVITADKCIKRLVKGRQD

SEQ ID NO: 2621 - protein, 284 aa, Neosartorya fumigata
MRFSALLVTLGLTGALATPTLVSREAPAVGVISDISAQTSALASAVSSYNGGDPSAVKSASEKLVSTINSGVDTVKSGPALSTADALALTSPVQDLTKQVEGVIDDLISKKDKFVAANAGGTVYEDLKAQYTAADSLAKAISAKVPESLSDIAAQLSAGITAAIQKGIDAYKDAASSTGTASSSAPATETATATETSTATGTVTETATSTPVIPTGTASGSASATPSTTATPTTGGSGSGSGSSTGTATASTSTNLLSTGAASKEHFSYSLGGAVVAAAIAVAL

SEQ ID NO: 2622 - protein, 190 aa, Schizosaccharomyces pombe
MFIINWFYDALAMLGLVNKHAKMLFLGLDNAGKTTLLHMLKNDRLAVMQPTLHPTSEELAIGNVRFTTFDLGGHQQARRLWRDYFPEVNGIVYLVDCCDFERLSESKAELDALLAMEELARVPFLILGNKIDAPGAISEDELKAALGLYQTTGKGVSKPVPGIRPIEVFMCSVVLRQGYGEGFKWLAQYV

SEQ ID NO: 2623 - protein, 155 aa, Schizosaccharomyces pombe
MASASPSSSRRLTKEYSDLREHPIPDIRVNLVDDNLFHWACTALGPSDSVYAGGKFHFSLKFPLDYPFQPPTIEFTTRIYHPNFDSEGNVCLAILKQQVFKPSIKLRSVLEQILQLLREPNPDDPLVASIAEQYRNDRPSFDKIARDYVEQFAKS

SEQ ID NO: 2624 - protein, 243 aa, Schizosaccharomyces pombe
MVLEATMILIDNSEWMINGDYIPTRFEAQKDTVHMIFNQKINDNPENMCGLMTIGDNSPQVLSTLTRDYGKFLSAMHDLPVRGNAKFGDGIQIAQLALKHRENKIQRQRIVAFVGSPIVEDEKNLIRLAKRMKKNNVAIDIIHIGELQNESALQHFIDAANSSDSCHLVSIPPSPQLLSDLVNQSPIGQGVVASQNQFEYGVDPNLDVELALALELSMAEERARQEVAAQKSSEETEDKKMQE

SEQ ID NO: 2625 - protein, 167 aa, Schizosaccharomyces pombe
MPSSASEQLLRKQLKEIQKNPPQGFSVGLVDDKSIFEWEVMIIGPEDTLYEGGFFHATLSFPQDYPLMPPKMKFTTEIWHPNVHPNGEVCISILHPPGDDKYGYEDAGERWLPVHSPETILISVISMLSSPNDESPANIDAAKEFRENPQEFKKRVRRLVRRSIEMI

SEQ ID NO: 2626 - protein, 317 aa, Hammondia hammondi
MLEAKLQHASVLRRLFESIKDMVSDVNLDCDETGLRLQAMDSSHVALVALKLDDVGFVHFRCDRERSLGLNLASVCKVFKLCSNADSCSIQNEEDSDTVTFVFENEADEKLSSFSLRLMAIDQDALRVPEDETAHDVTVTMSAREFANVVRIMGEFSDSVRVEVDKLGVKFVTQGDLGVGEVLLKPKPFASGDDSGVEIKVNSPVCQTYAVKYLNYFAKAASLSSSVTLSLTDQNPIEVRFDILEPASGGTASGDRAGDESQGDEGRAQGRRQAQQPRSCIGHVKFFLAPKMDDDAIGGDEGGNGESRGMDDSMMDE

SEQ ID NO: 2627 - protein, 169 aa, Bodo saltans
MEHSQVPGLPCQHYQLYANSLTGSLPFETLQQQPEWYPPLPSSWSAMTKMINLQLHANSLSGSLPPEWSSMTQITTLFLPTNNLNGTLPSSWSAMTKMNNLQLYTNRLSGSLPPEWSTLTQITFLQLYNNNLNGTLPSSWFAMTTMSNCQLQTNSLTGSLRLSGPPCPH

SEQ ID NO: 2628 - protein, 1004 aa, Bodo saltans
MAYFELNAAHRAKKSGSAPLSLLWRIVRVLIPIVGVAILSSSYVSASMCGCEHRYALLMNLYTATNGAGWYNNAGWNSANCSTDWYGVACNGADVTSVALPNNGLNGAIPASWWNMSALQYLDLNSNTLSGALPSEWSNMSSIQVLHLYRNRITGTLPASWGNMKQLYDLQLHITTISGSLPDAWSGMTAIRTIAIYLSALSGTLPSSWSTMTQMGNFQLYRNALTGTLPSSWSSMTRLQLLYLFQNSLSGTLPASWSSMGLVQFRLDTNRLTGTLPPEWQYLRGLIMMNLYLNTLTGTLPPEWSNMVYMRQLYLNSNSFTGSLPSSWSSMGAMQTFYLQYNSLTGSLPSSWSSMTQMTDFQLYINSLSGTLPSSWSTMTSLSTFNPSINRFTGTIPPEWSNMVSLVYLFLDENSLTGTLPSSWSNMRALKALYLYSNSLTGSLPSSWSSMTQMTDFQLYINSLNGTLPSSWSTMTSLSTFNPSINRFTGTIPPEWSSMVSLVYLFLDENSLTGTLPSSWSSLRALKALFLYSNNLTGSLPSTWSSMTQMTDFQLYSNSFTGTLPDSWSSMTAASIQLQTNCLKGPVPSSYARIGGGVKLCNTKVRGTVTKAVLCAGSSWPSYCAGIVSQSATTSPSTAASGSASHTAAAGVSLTISMSASHSVSRSETTTLVYSKSFTATVSSSLTATSVTRPHSQSQSQVNTTSFSITATRSTSRTRSPTGHSRSATISQNASVSAKTPSLTITTMSASHNHTRSATDTSSKSISLSSRTHIPAQHNRTPSISQSASLTSLSIFSGAKSQPQSATRASLTSTSVPTTSAFVTVVRAPTREQSLTISFTAASRSLSRAHNAPAPSLSKPTTMTVTLPASMPSHINTISTSAVACHVASELVVVALTPMISVALLSELQSGVVAVVTAASTQSPRNMSNGSTPTVIFDATPVPRLALLSLSPIGLNITLASSSSTGSSGGLVLWKAGNVTHAGLLLNFTTDAPGAAPWSAVVLQ

SEQ ID NO: 2629 - protein, 633 aa, Bodo saltans
MNSNALSGTLPPSWGLMSNLQTLLLYTNRLTGTLPDAWSSMTSLQNVQMGANSLSGTLPSLWGNMTALRTATFDNNNLNGTLPSSWSAMTNLTYLYLYNNKLTGTLPLSWGGMGSMQILFVYSNRLTGTLPDAYSSLSRLTNLSLSANSLSGGLPDSWGNLSSLLNLHLGVNSLVGTLPVVWSNLSSLSLLAMNANSLTGPLPPSWSRMTSLQGLYLYSNNLTGTLPDAWGSLRLLQTLELHINSLNGSLPPSWGNMSALTTMWLSQNSLSGVLPSSWESMSSLQVLYVYNNLLSGTLPEVYSRLSGLNYVSLSSNFLSGTLPDYWGNLSALLVFNLAMNSLVGTLPAVWANLRNLTYLGLYINSLTGTLPPSWGGMTNLQNLFLFTNKLNGSLPASWATMRNIKTLALYANSLTGTLPPSWGGMTNLLNLYLFTNSLDGSLPASWAAMVSLQTLSLYTNSITHTLPSAWGAMTKLQILYLFSNRLTGSLPVSWVNMINLQILDLSSNCLEGFVSGAFTSMPLVTNGGMKTCGTKIKGITNTPACPIPNLWPFLLQVRGFVNSECVADLIECKMSSTATGAISIRQSSFRSHRRIIPHNKTQRKLFIIEHLFHLFAVTVVITAPKRNTLVVEL

SEQ ID NO: 2630 - protein, 585 aa, Bodo saltans
MVSMMFTGPLVTAATMVAVLILHILTLPANAQCPCEGALPALQSLYNATDGPHWINPWQNMFSGASVCSLSGINCSSNGNIWIDLPLRHLVGTIPDDFAVRYPRVAMFAVSLNNLRGTLPRSFALFGEHIGVFDVSNNAQLGGTLPTEFSNWTMMNTFWVQNCSIKGTLPSAYASWGSNLRSFYFYSNDISGTIPPEYSAWSSTSEFSGSDNLINGTIPRALISAWKDTMYDFSLSRNGLLTGDLFGSDGNGFCEWIRIYNFIASDNMFSGSIPSCLSNWGTTIEQLSVSNNLLAGTLPSSLQSWTVVRNIEFGTNFFEGTLPAVYSLMKKMKIFNAKNNKLTGTLPPQYGQWSSLLRFYVDGNQLSGTLPDEYYGWGSSVFDIRISQNNLSGTLPASWGVFTNVERLSLSFNQLTGTLPSSYSAMTSLVVLSLDLNQLQGPLPASWQSLTALQAVGLQYNYNLQGPIPPSWSSMRRLLVMAVCNTSICGNASMFFLVGAFGFTCPQPSALANPDLDTAALQQYILASERYSSFPCISTPAPASPTPLPSLQPARNNETTAVLPYTALAQSSATAAVWSVVRPVP

SEQ ID NO: 2631 - protein, 958 aa, Bodo saltans
MFLCAPFTRVGVVLLLLWILLVAVRDAHGIVSQDEADILAEFFVAVRYGNTTPVTRENVCTAWPDPLVTCNSGATIASLNFTSQNLRGTLPESLARLSSVTLIDVTHNNISGTLPHQYAAWGASLEYFSVRNNSITGSLPKEYSNLTSVREFYVSTNSLTGSIPPEYSLWKKISGFYVYNNQLTGTLPPLLANCTMMRGFQASNNSFSGTLPLEYASWTAIFGFDVTGNHLTGTLPHQYSSWLLMEKFQVLGNRLTGELPPQYASWAKLTGFYAALNQLHGTLPPSYSRWSKLQAISLANNRLVGPIPSSWGSGMTSLSTLFLSNNSLSGTIPSTPFPQLSMFSISFNNFSGLLPPSSTWPFLLAFDVQNNTQLVGPLVVGQVTLIAMVCGTSLCVSSSSSPAKSCLPTAYFATTTVIDINSLITLATSYLYPLALCSITTQAPSLEPSRQSNATTPQLFSSLSGVMSAAAATVYVTLATTGGTLGRGAVPGLQRAVASLRLTAATNLSSDDDDDASGSSLFGDLADNPLGISIPVGAVGLSASAGAALMDIVLVGVIGVVLHAIAMLQRWVRIHQSVDRSDSAMIRLVRAIVLALPASLLPGALAMPYGTLLSSGVGACLALVVSTARSSGSVALGVTLVCVWAALPLYCAWAVVVRTRRTYGEFALHSVPTRSSSGRRSHGRTRSTKDATSKCVDVLLQVIRYAVDPTGRWERRSTDANVAQRRRRRGGRISATNNMSPSSYHKQAEYLLENMEGVFGGYVGGREWYFAVDWGVAFVGGAVMGSAEAASLDGDPCAAALWGTWCAVVLGVVQVGALVVLRPNSVRLEFWCSLVLGALGVVSVVLTLSGEDDGSAVVGTIMAILEPTLAVMLMLGRLELFGGDYHSFQPSSHETEPLQSLRGTEHQKRSPLGPAKQSVHDDLHHASTGFAMSASLQQLRLLIEAICERQLLENDKSN

SEQ ID NO: 2632 - protein, 152 aa, Bodo saltans
MEFYNAINGPQWTVRTGWGYVNNCTVSWVGVTCTSTSLIFSLPSNSLSGTLPDSLSQIVTLQTLNLNLNKIQGTLPASWKTLVKLSSLNIMNNALNGTLPDAWKAMFVITTLYLANNNLTGKLPASLGGPWRSINSIDVHSNSLSGRSQRPG

SEQ ID NO: 2633 - protein, 397 aa, Bodo saltans
MALANDENLRKQFRRANFHSGGMYSVRQGLMSEAEAIQEEQDDVETIIHRSECSGECDLSYCNLTAIPSNLVDITNLTKLNLEANNLLEIPDDFGGLCYLKDLRLRRNRLRALPISMCMMDVLETLDISNNLIESIPHEFSDMTALVKLVADFNYLGEIPMCVFIGMPALQELYLIENSGIVAGAVPHENSGIVAVPETPQGWASQYNALIAETKRFHLELDNSPELVASIDRFIASLTPNMAARFEVKYNKIWPDMVVDHIALGSLRTVQSMPSLQQLGVTHVLTCGRNLRTPQFPPPIQQMVLDVDDNDEQDMNQYFLTAIEFMQSCVSSGGLCIVHCFAGVSRSATVVVAYLMKSRQLSFTQALEFVQQQRPAANPNPNFRRQLIEFESMCGLR

SEQ ID NO: 2634 - protein, 287 aa, Hammondia hammondi
MFECTIEGLLLKRLMECLKDMVTDVNLVCNASGISLDSMDGSHVAVVDVRLAVDLFHKYRCDRPVQLGLSVPNLLLALQPVKSAETLVHLSSLHGDDEDDEEDTILHINIEDPESGDTWSMEVRLLDVESEQLEVPEHTEHEATAVVRSKELQDLVRYLNSLSESIVVKMDKTHMQLSARGDSVAASRKMQPESLVCTNSTEHEFAARYLNMFLKGAMLADFVEVGCSHGLPMQISFRLKLQAERERDVKKKGADRLHDVKMDEDEGPQSRSMLSFYLAPRIEDDEE

SEQ ID NO: 2635 - protein, 759 aa, Bodo saltans
MCTVVVAGPICGCEHRYSVLMDLFNATNGARWRNNSGWGTLAPCTTNWKGVTCTPMNVSSDSSSSFWYDVTAIDLGNNKLSGTLPRSLVNLTNLVILSLGVNSITGSLPAEWSEFGHLVELYLHSNTLSGTLPDAWGLESSATGGGNLSTTLKTLYLSSNSLSGSIPASWGPSLLVTLQYFFAQTNYLSGTIPDTLTGAGMNMLQIYLSSNLLSGNLPSSWKNMAQVTSIGVAGNRLNGTLPPSWGLGMKQLESLTLSSGSISGTLPAEWGEMVSLASLYLDANSMTGSLPASWGGMTSLALLYLHYNQLTGSLPMEWGALQNLTVASLNGNAFTGGLPSSWGNMISLNTLYLYSNNLTGSLPPSWAQMPSLSSLSMYSNSLRGTIPAEWGQLKKIHSIYLNMNCLYGAIPGNFSTLPLNPGGLRLCNTNVTGGGGSKLASCAGVDNPSVWPAYCSIVPQLHHTKTQTVSPPSQTSSYTSSSTRSSTRSMTTSQQHRFTLTPTVPVDSTESLPDNATTSWSPSQSYVTCAALLTTSILRDSVALSPVTSQLPTQGNIGAAEVAVLTQQQRQIITSEILISANPLGRSLLMRAPWIAMNMTLGLFPWNAMSRFSVANVTLADSRRSATTVLPLAWLVEVPHHHPLGDAATDTDKSTVDLAWFVIFAAPPSGSGGGWLGFDTPVMTDKTLQLRVTLTCDGAPAVTVAVNIPAPGSLPSLVGEVKAAVGYSQIVSVIAGGASSERCRCCSRWRCGGLRSETM

SEQ ID NO: 2636 - protein, 418 aa, Bodo saltans
LSGTIPPGVSATLLLVDVQDNTQLSGAVPPKLTLFGSVVICNTNMTCPSSTYPTLYCFPANFTFDSLDIVALSIAAAPYKVACTTPSPPPIRPPLSVNNFTRSVSFSLTQPMAVTQPYDALHTSSNAAAAMMYATLVTSGGVVGRGAVPSVQRAANALRLTALCQQLDNTADTNAANPVPCSDLSDYPLGAPIPVGDEMLGLAAGAAVLNLLLVLVISVGLHVCGVLQHCMNVAAARKHDKGSASKTTSCSPAVWKLLPSSNLPGAIAIAYGVLFQPSLGASITLLAFTGCTARSVVCGVAMLCAWAVFPLYCVYEVVWRGRDCGVFVLESVSQRDHGDAHGDQPVLQWWNRLRHRVMSPQREWRAPRTHNFGGDGAANNQRVVFLLRNMEPVYGGYVGGREWFFIVEWCVTAAGGVV

SEQ ID NO: 2637 - protein, 221 aa, Bodo saltans
MVVAPVSSGIASQAEVDVMAEFFTAVRYANTTPVTQSSLCTSWPSMVVCTLDSVTALNFTNINLRGGTLPASLSRLANMTSLVIKSCSLTGTLPPSFSSWPRLSSFDVSRNDLTGSIPSEYSRLTSIQIFSCEFNSLNGTLPASLSAWGDIYTFTITGNSLSGTLPAEYAAWRHVTVLNVENNSMTGVLQAQYSALTAMFQFDASTNLKGCCLHNMVHGLS

SEQ ID NO: 2638 - protein, 1242 aa, Bodo saltans
MHPSWPFRRIIVFIVLLISKDVLGQQCACSNRSSLLKTFYDATSGGAWHLGCRWDTMAATFPCSAAGITCDATRSDVTQILLSGCGLVGTLPPGLSALTALTHFAVNNNTLTGSIPEAYSAWRSLLSFGVASNALVGNLPSSFSAWTSLTDFTCAANHLDGTLPPDWSAWKQMTTFQVNDNALTGSLPPQYSDWGAFMNLLYIYNNLFSGTLPPSYKDWTNVTLWYAANNSFTGTLPQEYSAWTSIEQFQVQRNSLSGALPPSYSGWSKIVGFVAFNNSFFGTLPEEYQAWRVISYVDVGSNSFSGTLPAAYGSWKTLTFFAVGQNSLSGTLPPQYRSWTLLTQCIVIKNMLSGSLPPEYSSWSSLSNIDVSGNRINGTLPPSYKNWTSVQAIQFNSNNLSGSLPAEYSAWRSMGEFYISLNTISGTLPGEYSSWTNVNVFDVQSNQISGTLPASYASWSMVTHVNMNNNLLTGTLPSQYSSWSLIVIFDIDINKFAGSLPSSWQTWTEILSFSASTANLSGSLPPEYSAWTKLQEIFLYDNALNGTLPAAYSAWLAVILVRWDGNRFTGTLPPQYSSWAALQRLYVFANSLTGTIPALYGNIATMTYFQAHDNSLSGTIPIELVTIPTLKLLSVGYNKLTGALPSRCSSTIQVFSVQNNTLITGSIPPQLGAYTPISVCGTQVCPTTTWFLQYCFPRNFSFTTTSQTTMLTEAQSYLRLCTVAPPVAQYSKTLSVAIERVPTPKQSIATVSAPTRGTTSAATYTALLSTGNALSRGALPGLQRSASVLRMMGACNAPGSSSEPLYSLLQDNPLKLQLQLGVPDPLGDIDFAAGAALGNTLLVVAVGVALHIIRYICMRLHHSSTACSRLLMDFVSILPSALLPGSLAVAFGTLLQPSLGASIALIASTERSGGTVAYGALFLCVWLALPTYYVWAVIWRGRKMSNDGEFALGSVEIRTLPARHNHNNNKQNNRLNGNVSVSTIVRHMLALRSYAMSPTHRWARRQGSGASKRDVEFLLENMESVYEAYLGGREWYFAVQWALAAASGIALGALQVIGNDDASLACPTAYAGCGVSIAFGAADITLLLVVRPTAVRLELWSGVMISALNIVSQALAASNAIDASNVTVSALLELAVMLLLMLNGVTSVAQGEGEELLRAAEGEHHMGARYKIKKLEVTHNDTTTTHRSAKSTQNLIVVNAHQGKSVERVPIVHLHHFLAGDVQHRLKILVKLASRRGTEKRK

SEQ ID NO: 2639 - protein, 821 aa, Bodo saltans
MARHFFLLLRILLIASFVLDTSHATTPMCGCMGQASALMDFYHSSNPESWTHSDGWGSTNCNIPWYGVTCDGASITSIDLRTNNMSGTLPSSWGNMTSMVTLVLYSNPWLGGSLPSEWSSMSKLSLLYIFVTNISGTLPSTWSNMTSMVDLELYSNPMLSGTLPPEWSSMSKLTNLLVFGMSLSGTLPSSWSSMSRITYLWIFGTNVSGTLPSSWSRMTSMVDLRLYSNPMLGGSLPSEWSSMSKVSFGTNVSGTLPSSWGNLTSMVDLELFGNPMLGGVLPSSWSSMTSMVTLVLYDNPMLSGTLPSEWSSMSKLSTLYIFGTNVSGTLPASWSNMKSMVNLELHNNPWLGGSLPSEWSSMSKLSLLYIFVTNISGTLPSAWSNMASMVDLQLFSNPMLSGTLPIQWCSLPKIVRLLLYGTNLSGTLPPAWSSMSTIANLQLSSHLLAGTLPSDWSLLSKLSTLYIYGTNVSGTLPSAWSNMTSMEYLLLHLNPMLNGTLPPEWSRMSTLIGLYIYGTNVSGTLPPAWNSMTSMMDLQLNSNPMLSGILPPEWSSMTIVFRLYIFGTNISGPLPSSWSNMASVVYLLLHLNPMLSGTLPPEWSSMSKLSQLYIFATNISGTLPSAWSNMTSMVDLELHDNPMLNGSFPPEWSSMSNVAYLNIFGTNVSGTLPSTWSSMTSMVRLRLNSNPMLCGTLPPEWSSMSQLSMLYIFAANISGVLPSAWSNMTSMVYLQLHSNPMLSGTLPSEWSSMSQLNGLYIFGTNVSGTLPCSWNTMTSLQLLALSSNSIGGTLPPSWGNMTSLQQLQISGNRLVGSVPAS

SEQ ID NO: 2640 - protein, 1003 aa, Bodo saltans
MIQIPSKFTAPLWMVCVFLSATVKCDTSMMIQTDFAIFVEFVSAVKFPNKTVLTENKACDGTLVTCSSSGFINTLNFSYQSLTGSLPSSLANLTNLVSFSVSMNSLTSTIPSELSRWGSMIKSFDVSSNLLNGTLPSSLRNWSQLQRIDVSNNTLTGTVSNEYSSWGAFVTQLDLERNAFVGELPSSFGVAFTNLVKLDVSNNKLTGPLPESYSHMKMLQHLKCSNNTLSGTLPASYANMSRMQTFEVENNTLTGTLPPELSVWGDALETFNVCMNTLNGTLPEVYAKWTRIVMFEVHSNSLTGTLPSNYSVWARLTQFLVRKNALHGTLPPEYSQWSLLTVFTGMSNSFRGTLPPQYSNWSNVIQIILNNNSLRGSIPTSWKASMTKLRTLGLSDNMLNGTIAFNSATLIFLSISFNNFSGALPTKLWPFLMLLDAQNNPMLSGTLTQFPYLTVASVCSTNICATNRSPAALIACFPVGAIASLDDSEVSSFVAMAEFFLTAANSSSCNSSSPTPTTTNTMPPHHRENLTNASAATTVLHPSAQATTASIAAASAAVTTFTGVDAADAQMLVSILASPCTCTAAESSAASPSLLLLALSPFSQLGSSWAVIGSSLLCCAFVCLHTVSVHLVNRCNSATNVRRGHTLTVPTVLGRWISGDADRRRDVLMRVRYPNLSVSVVLLLMPGVLRGVVSVVTDMSSNDKLGETAVAIGFFCLMCSAAALEKLVYRHADEELSVKNNIEGVFHFAKHRRVGKLFSPISVSVARCVLPQGRWVPEMSRKSFGGIVSSLADRGRRAWCALPLSNAVVQILNAVGGSHAVCNALQSLTIIVLAAVSVFFGVIRPHRALLASYLTCVSLLLSCVVTLLAMLCRLGSVDRSAVNGFGVFASVAMMVMKAYHIALPLVEAWLIGRKKKQQSPHRTTARVPHTANQVLPMEPPGKHTSIVERNGLLRTSQMTTFPLVALREEKQTYSVAAGGDRQRIILSKLVSMACDRAEVVDLN

SEQ ID NO: 2641 - protein, 984 aa, Bodo saltans
  misc_feature (838)..(937): Xaa can be any naturally occurring amino acid
MFDLQLRRFFRKLHIKMNEPRSLTLGSVDALLFFVLFIGVAFLPQRIEAQACACQGSLATLTAFNTALGGAGWLQTWPTSSSSANVCSFYGVTCANGVITSIILNQNMLAGTVPAALSSLTGLSVLEIGTNSVTGTLPPELSSLTSLTRFSVKENLLSGTLPAAYGAWTSITYVSVRNNSFTGTIPPEFSQWTKLQSIDLQLNALTGTLPSELSAWSSLASFLTCCNKITGTIPSSWSSWRLIGFFHIAERSITGTIPAEFTSWTSITYFGLWNTAVSGPLPDAFGSAWASSIVEFTILGNSLSGTLPSSYSSWSKISNFSVSGNTGITGTLPSAYSVWTTIFNFTVSKQSLSGTIPSALGDTWRRINTFDCSSNSLTGSVPVNIANWGSALQTFNVANNQLSGTVPNEFGNFNGLYQASFNGNTFTGTIPSTFGSWTNLRSFSFSNNQLTGTLPPQLSAMKSLTAFSVDGNLLTGTIPSSFSAWTSLQSFNAFSNNLVGTLVFQYNAWMSLQVFRVHKNGGLTGQLPHEFSAWTALSVFRVSDCSFTGSLPDEWTSWTQLTTFDVRNNTFSGTLPSGYATWSVVTVMDMSVNSLSGTLPAAWGSSLRLLRYLGLLSNSVSGTLPSSWSGLVNLTAMLLGGNTLSGDLPSSWGSLRLASLILQGNTGLTGSIPSSWSSIATGGVVAICNTIICGSASSAGTSTFACLPLTALQTLSFATSITPPSGTTFSTTSPCPTTAAPPPTPAPTPSPPTTPAPPPPPPADRDGLRKVAILMATLGYAGFVLGEDVSDIQMMCGVMASSMMCGGIAGAAEPGLYLLSPFLVPLGPAAAAFIHTMXXXXXXXXXXXXXXXXXXXXXXXXXXXXXXXXXXXXXXXXXXXXXXXXXXXXXXXXXXXXXXXXXXXXXXXXXXXXXXXXXXXXXXXXXXXXXXXXXXXXAAAAGTGAAASLVTRRAAATRCRQSCSWRRLCSASRCSPCARTASCL

SEQ ID NO: 2642 - protein, 309 aa, Bodo saltans
MLECTVSSANLWKRLVDCINGLVNEANIDCSPGGLSIQAMDTSHVALVHLLLRGDGFASYQCERNDMIGLNLASLAKVLKVVDGADTLTMRRAAGTDTLILSTENRNRSKACEYQLKLMTLDTDAMGIPEMEYRSNVVLSSAEFAKIARDMAVFGDTITVDIDQSGVKFSCSGDVGEAVAFLRSATAADALRSQSKKSVKPEIKPELKGESGTVKPEPRGDDEEDDAPIASKFKAETETPSVGVEINLEEPVTLSFALRFMNIFAKGASLSDRVTLNFAPDSPCMIEYEIEKLGYLRYYLAPKVDEGEK

SEQ ID NO: 2643 - protein, 384 aa, Bodo saltans
MFECSDAKKKREYKSETMKWQAKFVFGWTVVLHCLWMSCEASTKQSERSALILFYNATNGPHWKNTPWPITDSGADYCSGWNGVRCNAQGRLQRLSLGYEDLIGAFPNEAFAEFEQLEELDLAGNKLSGTVSSNLCASGAYLRKLNLNHNLLVGPLPSCVSSWTSLTEFKVTGNSFSGSLDSKWGSSWQSLREFSIDSNSFSGTLPESFSHWTNLTTFVIELNDLTGTVPDAYGRSWTQVTVVSLSWNYLTGTLPPSFSNAKNMKEFVFYRNDFASTLPPEYGSWGSTMIHFEGSNNPKLHGSFPSSYGAWTGMEVFKFTECALTGSIPPEYHTWHNVANFSVWKNNINGTLPSSFSNWKNIQDLTPATTSLKVHCPRNGRLGA

SEQ ID NO: 2644 - protein, 1007 aa, Bodo saltans
MPMLFVRRSAIKAVGSNRDATTSLFIILVLATSELTTLSVDAACTCAYRLPVLHELYDATKGAQWVRPWNMAAVDAPCGFDGVTCGVSDDISSIVLSSRGLDGTLPPSLGQLNGLVRFDVSNNGLHGSSLPREFANWTSLEMIDLSSNSFSGTLPLSYSAWAALTTFRVASNHLAGALPEEYSSWTRLTEIRLWTNSFSGTLPLSFSAWVNLEIFDAGDNQLSGSLPADYAQWVQLTNFFVHENQLNGSLPSSYSSWTRLTVTWLSANSFSDSLPSSYAAWTNLETFDVGSNQLIGKLPAEYSAWTNLDSFIANTNNLSGTLPLSYSAWTNVRNVRISSNSISGIIPVQYAVWKSIQFLRLDSNMLSGSIPNLLFGGWSATILVSLRMNALTGIVPLALLALPALENLYIGLNMLTGTLPSTISTSVAFLDLQNNSGLVGTLPLRSMFTTVCGTDVCPTASLPLQYCFPLNAGELVYAATSDPLHMRTSLAPYASNCTPTAAPSSIAPTPQPSPDAAPGNLSSATSLRPSTTRSIGGAVVFVSSIVGSGGAARGAVPSLQRAMIASRLELLCLAVGVNESASDGMFSDRGDNALGFSVPVGSSSLEYAAGATIGNAVLVVAVGACLHGVALLRKYLHGKFLGAPMISIATSALQMLPSSLLPGALAAAYGTQLQPSIGAAVALMTSSTRTVQSVACGVALLVVWLAFPLYCVHLVLVACRSRDGAFGLVPITAGPRRRERPHQRIQAAFLRVQLRSLHEYWMTPSTTWEVRKFGRAKNIAVFVLEHLEPVFGAYVGRREWYFVLEWSLVAVGGVVMGAASAVAADGDACGAAEWATWCMIVIGAVQIAAMVALRPLDVRIEMASGMIVGLLTLLCLVLLLVGAVDAAEAIVNAAGILELVVMGAMLVDVIALRLDVTFAKTDSPDDHENCLPRTARSVASDARRKRVAVANAVRRRSLLGVELQPVGRMVMADADTVDSLRALVTLACAGADQLRALDAAQRKKPRT

SEQ ID NO: 2645 - protein, 1092 aa, Bodo saltans
MSQFVRGQRLTAFSARRHRWISATTSFQWMSLFLLACLFVAAESDNIITISQVEVEALREFVTAINLNYNGSRLNTTNACTTELPGMVECNATGITQLNFTSRNLTGTLPANLSKLTQLRDVIVYNNRLHGTIPTEYSRWGQSIRSFSLYTNNFTGTLPSSFRNWTLVQVFDAHENQLSGTLPDEYSEWRNLTTLLLAQNRLTGTLPAKYSTWGSSIKYFEVENNNFNGSMPPDYSNFTNLTSFYVSDCGLSGTLPESYAQMTRLESLRCSSNQLTGTLPHSYGNQSNMIVFVVQNNSLTGTLPEAYSSWRGLVYFAADNNKFTGTLPAAYSNWSSVTQFYIHNNILNGSLPPAWGSWTQVSTFTARNNSFTGPLPSNYASWRSLQTIDVSHNQLNGTMLEGFAAWGENVTSVILANNNLSGTVPSTWCTTMKKLALWNIANNLFEGPLSFGCIFSTFIAFAFSSNNISGAFPFDNFPFLIVLDAQNNTHLSGTLTSSVWLQIASTCGTALCAEASTSATLTCLPSGFVANQADDASPSQIVMEAKSYNISTSICPQTVSPSPAPPSSTLAPPPPLTAIPQPNTLSTTAATSVAGITTASAAVSAMFGADAAEAQMLVSILGSPCTCSGGTSATSDGSVLLLALSPFSPLGSSWAAIGNSLLCCALFGVHVLGVCVLDALAATAEHTSPKRQSVPFYRPDTSFLGRWRSSQRGRRGLLMRLRFPNLSVSLVLLLIPGVVRAVMSVINNFSSGSMDDVALSVVAIVIGVVFLATAAAALELLVYRHIDTEVLLAKGEQQQDSLTVQGGSLRSQQRGHKQFRSNDASGALLLHFINHVHLETVFSPLPRNISRVVLPSGFWTPPSARKAYGTMVSSLTDAGRRWWCALPVVNAIVQVLNSVSGGGSRACDALQSLTMVVLACACVFFAVVRPHRALLASYLTCVSLLLSCLVTLLAMLCRLGSVGRSAVDGFGVFVSVAMMVMKAYQAGVPYMEAWLRRRNGFTGANAAAMKYFFGSLFGDVDEVPQIGEGVRVQRKSTSNRPSRFSSETIRELLSLKYNQDEALKAVVYLVCSRNAQTQRAGFQPSINQETKK

SEQ ID NO: 2646 - protein, 1416 aa, Bodo saltans
MECPNCSCTVAFASAFRFVVATLTHISCAKKMSSWCLLYWTMVSMVVSLSFITIITPVSACNCSTRIAELRSLYTATGGGTTWSVTWDFSDPNAPCGFTGVTCNGADISELLLPRIGLRGPLPASLGALTALERFDLSSNALTGQLPAEFSNWGRIVHMNVSFNQLSGSIPLDYGSGLGGAGLPSLLEFDASNNGLTGSLPLQLRLWGNLILFWVSSNMLTGSLPSEFADWRNLIRFRVNVNNLTGTLPNSYGSSWLALTEFSVHTNNFTGSLPDAYSHWTSLVVFVAERNALNHTLPSSYSAWGNFIVLFHADENQLSGSLPATYSVWGRIREFFVSDNQLNGTLPASYQTWTAMGAFLAPRNQFTGSLPPEYSAWSRQLQYVDVSSNRLTGTLPLAYGSWTTIQSFSVANNSVSGTLPPEYKAWSTLRGFGCDLNTLTGTLPPDYALWSQLTGFYVNTNQLSGTLPSAYGSGWPSNAFQDLLLQDNNFTGTLPATYGKWAQIKGFRVDTNHLSGTLPEELGSWTQLREFYVSLNDLHGTLPSSYQSWTLLSTFAVKSNQFSGTLPKEYSRWTNLVEFFCDFNQLNGTLPIDYASWTHLQSFSVNANRLNGTLPQVYQQWGMSLLSFDVSLNSFVGSLPAQYNAWGSLATFSARGNMLTGTLPSEYGAGWPNLVMFDVNSNRLSGTLPAAYHQWQGLQYCYIQANQLSGTLPDVYQSWTLMRDFWAHENLLTGSLPDDYSAWTFVSSFRVNNNNNMTGAFPTSYRLWTAGPLKEFIVSNNKFLGPLPVEYREWTALSAFVIYGNAIDGTLPPDYGAWTMLVSFSAGSNQLHGTLPSNYSLWGNRVQTFIVDKNAIIGSLPQEYSAWTAIRIFDTSFNNISGSLSSEYSTWVNVQQFMVNNNGNISGTLPERYAAWTSSIQVFYVQLNQITGTLPTAYRAWVGMQDFSVYNNQVNGTLPPEYRAWGSNLTAFSVQYNSIEGTLPADYKAWTQITLFRVQANRLYGSLPSEYSGWSSNLQEFACHTNRLSGTIPPSYQQWSNSLLRFYTQGNMLSGSLPVTLSAWTSITDVNIASNNFTGSLPPQYALWTQLRWLVANQNQFSGTIPSSYATSWRFLQLLYLSHNQLEGTIPMQLFTQPPFLSTVLLSFNKLIGTIPECPSTCAAPIQFLDIQDNTELRGQMPPKRMPWLFAMTLCNTSVTCPETSEFPQQYCTSSTFVFVSTDPAAALTSLKPFSSSCVNTNTPAPSRPRPTVTQSKPLPASPPSEGVVPATPTASSSAMMYAALVGGGALGRGAVPGLQRATASLRLAALCANSAVDDDGAPGDAGGSGSAMFSDLADNPTGASLPVGSAVLGPAAAAAVLNLVLVWGIGAAMHVAALVKHRVKERATQWPPMARCVLAVVPSALLPGAAAVTYG

SEQ ID NO: 2647 - protein, 1160 aa, Bodo saltans
MASTAVVTLRGASLCFFLFVFFASHMCHLATLLVVMLAMLNIAEATADTAAQSLLMEFYRSTGSRSASSWNLQSDVCKTTSVPFNISNDALPRDRQRWDPQQHFYCNWFGVQCTVSNSSSVVEGSPPTTTTTIVVTKISLQSCGLGGTLPAVLLQSTPAATGVATPAPNTNPPPQGGATSNITVSSVLLDTLELQNNQIAGTLPDAYGTATSALTTFLVDNNKIRGALPSSFGDLFGTSLTLFDVSNNAFSGTLPLAWKTWSQVSRFVAVGNQLTGTIPPDWSMWNNSITYFDIGGNALSGSLPRTLRAWSKLMFFSVSYNKLTGTLPPEYSEWSSLQTFWVYGNSLSGPLPSVYSNWKAIVTNVGFSGNQFSGTLPESWLQWSSLSYFDVSINSLTGTLPASYSNWTLNFIKHKLEALQVFSNALSGTFPSFFVSASFCSSLVTLDVRDNHLSGGFPLRGVIMNCSSLRNLYLSNNFFNGSFFNNLPSIAAEVKATNIQELFIAFNKFTGTVPNDDTLVTLFPNMTMFHIFENQFIGVMPILPVIKWKYLTEYRVSSNNFTSSNLSTFDNEIVSQYRTTDQWNCSLKVFSMSFNKNVTSGSLPKSLSACTNMSTFEATEINMGGGTLPDDYGRAWAGSITTFSLVRCNLSGTVPMSYSQWSLIEQFDVGVNSSLHGDLSFANKWRALKIIRLESNLFTGTIPGGFSKNINLTQLWLNVNQLHGTLDSAFGAGCPALRYFYVHTNNFSGTIPMEFASWPVMERFYIQNNRFEGTLQKAWAQWGPTFAEMNIGNNSFSGNLPAEWSAWGNVVVLMAAINSISGVLPISWEKMKYLGTLALDANQLTGTLPSQWSGLSSMDMMSLTYNQLSGQLPREWASLAKLRFLGLQGNANISGAMPTEWKQQLSFVYISICSTALYGSPWAPTVQYGLLGLPSQCFPCITEGTDVSSLTKAVNAVKNSCNSSWNGMQTAPPGQLPLQPTPSTSSAAPIPPPSPSPARDAAGVSIIVGAGVVAILGGDPASAQMLVTLLMSSCMCGYSGDGGALSSGGSDDGVFATIVSSLTLSPFSSLGNAAMAFGNGVLMFALVGLHALLVVLLGRCKERQDRRKPHSDNNNVWRDLCTRPEASAAKFPNICVTCGLFLVPGVVRGSVMVLGTSRSS

SEQ ID NO: 2648 - protein, 908 aa, Bodo saltans
NLQYLSLYFNSLSGTLPASWGNMSSLRQLLLYSNSLSGSDGRSTPLYSLDVMDRNMRLSESPCDGPSWGDMSSLWNLYLYSNSLSGTLPVSWGNMSSLWYLYLYSNSLSGTLPASWGKYRSDVMDMNRRLSESPCDGRSTPLYSPLRSLYLYSNSLSGTLPASWGNMSSLQYLHLYSNSLSGTLPASWGDMSGLRSLHLYSNSLSGTLPSSWNVLFQINVSNNCLTGSIPTTFSAATSRIQWIDVCNTGVWPRNFSISRVAVCIPNTIRRCTIRSDSSALSAVTTSWSRSYRTVTTLPLESQSQSYLPWLGGCGAAGVQLTPLISLLAATPAFIFVDIVSPDAGNEGFEPAAPHVIVVNAIDRAEILQNPVVRMNISLMTQAFNTKRWDLANITMTGIGPLRFTIVNRSDDVVPMRWFVALVNPPKRIGGWITDSVPLFVDATFSMNLIFSCDVESTLSITVMIPSTGVPRALAGGVETSAKSTQIISLLSTGGAGSSLGRLLATRSLILCDADSAMNGGVLDMGIVICATTSTTGVVAARSAIVNNLLLVVVLFSVLAVAMLSFRYQMPALMPLDTFCFPSSLLPALTIVGPSTAAAATYLLARLGSSACVAGDVVLGVVGLAVAGCPCCFVVYVWTSLERHKSAVSCERSDVRHTADFDGCIGTVVAAVRKGAERRWKWKYDDVSQFKYAWVLLLDVRLLWYAVMDSALLVVIAIAAVIGGLSGSGDVDSCRGWSIVVIVLMCIQLLVLLYYQPFTSLFEKKTAFQLAFLYESSSTSVSQLWLVDASAVCGLIVVGVSGLKTLMDLRDVAAACRRRFTILQTLWRNGLSAVNRSNETQSEEEHRKPELMPIDAVLDHQPMLLLDDVRDEILLPDSSIASSEFDEQFWDSDGNALAQDIGRTQMHFL

SEQ ID NO: 2649 - protein, 215 aa, Bodo saltans
ASCAQPVTHRAPSLSRIVRPACRASCVQPVTHRAPVCHASCAKPVTHHAPVCHASCAKPVTHRAPSPSYGNWRNMTDFEVGLNALNGTLPAEYSAWTTVTTFSVRNNFLTGTLPPSYSEWNAVKAFSINDNRFTGSLPASYGSWTYLTKLSASTNNLSGTIPNWEMPTLDSLSVFQNSLSGTLPSTLSSMSGFFGSHNDFSGSLPATWSSLRMLG

SEQ ID NO: 2650 - protein, 895 aa, Bodo saltans
  misc_feature (499)..(599): Xaa can be any naturally occurring amino acid
MTGTLPLEYSNWSSLQFFSIGTNNLSGTLPSSYSMWGTSLFWFDVSYNNFTGVLPPRFERWTKVTTFKCKGNQIDGTLPPEFASMLSMGQFDISGNRISGTLPSSYSSMIKIQLAFFDANALTGTLPASYRTWAQISNFRVDDNCLIGTLPSEYSNWTMMQDFECSNNSLSGSLPTSYSSWISLRKFFVRGNMLTSSLPPGYSSWRNLTTFDVRDNIFSDTLPASYDAWNQLTAFKASNNRFTGTIPFNWSNMALKLTSLLLSNNSLVGTIPSLIFPTLQAMSFSVNNISGTLPLATSWPYLAILDAQNNTLLSGKIPTSVELLIVTVCETHLNFSTPSWSLFPMYTCLPDHFIDKVADISPTEWILQISNYTYTLPPPSSASPITTVVPPNAAINTTVTILSRTASASIASVSAVTTASALASTFADSDAADAQMLVSILGSPCVCSATSPTQQREGSVLLLALSPFSSLGSSWAAIGNSLLCCVLVGLHVLVIRTLXXXXXXXXXXXXXXXXXXXXXXXXXXXXXXXXXXXXXXXXXXXXXXXXXXXXXXXXXXXXXXXXXXXXXXXXXXXXXXXXXXXXXXXXXXXXXXXXXXXXXPSSALPPSVWSVSYGGPEWNTTSDSLAEANMLNDYFKLMTASGVTMVVSSGDSGAGFETVAPLVSYPASSPYVVSVGATAQRLHEGVVVQAACSAADGNVITTGGAFSQYFEVPEYQAQAVKSYVDAHPGFPTSMMSSSQRAVPDIATIGAWVNVVFSNSTIPVFGTSIAAPVLSSMISLANDKRRIAGYAPVALANWMIYNAWSADSTTFDDVTLGSNCAGEPNGSPANFPTYAINGCFNATVGWDPVSGVGAPRYPAFNGVIGGVVGAAVIAFIAYRLCARPADQSMNGEYEKI

SEQ ID NO: 2651 - protein, 739 aa, Bodo saltans
MKTLRLEDNALNGTLPSSWSRMFAHLTTLHLNDNSLSGTLPSDWSALTQMDSLHLSSNDLTGTLPSAWQSMTKLTDLNLRSNSFTGTVPSVWSNMTFLQNLNLRSNYLNGSLPASWGSMTKLNRLSIRSNDLTGSLPTSWRAMIAMSDLNMRSNGFTGLLPAEWSHMFNLFSLELQENSLAGTIPTSWGNLTKLTTLQLNTKNISGTLPPQLSTLTVLDKLHLFENALSGSLPTEWSAMSSLTDLNLRSNAFTGSLPEAWSTMTKLQVLNLRSNSLTGSLPSSWGTMVAINEFNLRSNNFTGTLPDSWSALVNLETLELDENALVGTLHSSWANMTSLVTLQLNSNSLSGPLPDVWSRCLGGAAPLRQQPHRQSSCDVGGRRAAADCVLASQQQQLHRRNTPIVVVQHDRAGNTAHQNCSLMGPLPVSWVGLTNLKDLHMGSNTLNSSLPDQWATLTNLEIFHLGDNVLGGSLPSSWGAMANLKELHLNNNQLNDTLPVAWGQMASMEELDLSANQLTGSLPSSWGNMTKLVALLLDKNCLEGFVPEPFASLMTQADVSFCQTRVHSEYNRTLNCSGASGWPSYCHYSMSTAESHSQTNTISLSDPASRSTSANNASATLLRHDAPSNSTTPTMDTTCSKTISSTFTPTVSRSILLSLGSLTTSQTAMLSRSSSLASSTAAMTESITSITPKLSSTLVRDEATGSLSAATPSPSSPSTSSASQSSSLSFSDPTATSHTL

SEQ ID NO: 2652 - protein, 1175 aa, Bodo saltans
MHFHLTVLAKTFPGVFFLCLSQAPLSVKSDQDEMIDSCEVLCRSFFFFLRMRRIRFSFFVRPAVSWYTNTSLLSFACELGGLICKFERVRKPICNIMQRSFTSAFVMLFLAMNSTTIFFAYADGVTCACSQDSFVLQEFYHATGGSQWYDPWDLSSSGLASFPCTASGIMCDSAAGRVTSITLANRGLVGTLPNNLSTLSALLIFNVSMNQLYGTLPSFMSSWNQITTFDVSNNSISGTLPPNYGQWATIKTFIVLSNNLTGSLPSAYSLWSASLTMFDVSRNQLNGTLPIAYKHWWNNGASTPPYENVFTVSNNNFSGTLPPEYSQWRGLKLFEVQNNVLTGTLPQEYADWTSTAALSPEGKSLYEFHVEYNSLSGTLPLEYRSWGGGISRVYLNNNNFSGTLPPEYSSWVSLTVFFVNDCPLLSSVLPESYSMWSRLEILYVQSCDLFGTFPVAYSKWKRLTWFNAANNRFSGSIPASYSQMQLLQRFTVQNNSLSGAFPASFALLSSLLQFNVGSNNLSGTIPTAWGENMISLSIIMLLGNRLTGTIPASIFKPPLLVTASFGFNDLSGDISKIVFGAALSFVDFQNNSRLHGNIPSTAGKQLLLMTTCGTRLLCPKPSNALQYCFTPQVLAQFSTTATVSIVLAMFMYTSTCPSFAVDDGTKTSTILLPEDSEIAPPLDAFSTYTPKYNPPPAFVLVANLADPVSGVALSVLGNGRCAPAASKNSTSITRILLSPFFALGPGVSVLGNIALTVVLFALHLVAVVFLKSRRDVSTPKDSKSRKIERAHRHLGSCMLLLVSSAAKTLKFPSLSVTLTLQLAKGIAFYCGQGFIEGAEDEMIDSVEMRIVSIIVAILFVVGVVLSWVVAERRGVSSALQFETYKLAALRRWKWVPPFVLPSGRWGPDDARQRLAALRGPVKGGSEKFSMLTAGLGISGALLVGAVPGSVNGCIAQAVGQCVLLGGAVVLVLAQQPMRIQFAGWLLCAQWSTQALLNISMAASRANDSNNCNTAVDATAVLTVIHAVIGMIAGLHRGFVILWERGVHPNDMMSTNNSSSPTTLNIAAHIQEPPPPPHLKTAQIANGMKSRNQCHHLTIKVMNEDSFATPIDVALMSNSEQEDSNITTIATSMTPSSFVVYPPRDERFDQNLRNLVELCCLKSFNERHHQQATRNL

SEQ ID NO: 2653 - protein, 1264 aa, Bodo saltans
MVCIVLQWLLVLLMEVPHFGTAACVCSERASIVQSLYAATNGASWIRPWDMSSADVPCGLEGVTCDAAVNDITKIEVAYRGLTGTLPDELGGLAMLEILTVASNALSGSLPDSLGQCKYLRRFDIYNNSLSGTLPAVFSAWTMLSFVSIGTNLLTGSLPKEYSAWGGSIIEFYCDKGSLSGSLPTEYQAFVKLSIFRIASNSFSGTLPASYSGWSSLVEFSVGSNEFTGTLPPEYSALSSLTTFDFPNNNIEGTLPPEYSACSSMTVFGCSNNLLEGTLPPEYSRWSLPVLVDFGGNQFVGTLPPAYSNWKLLQSISLADNKLDGGLPLSYSSWASLYLFWAFDNNITGTLPVEYELWTKLQRFRVNDNQLQGTLPAEYSAWMSVTEFDCSNNLLTGTLPPSYSAWSSVSLVNVSANTLTGSLPAQYSAWANLAHIYVAYNHFTGSLPREYGNWSQLNDFDCSVNSLVGTLPTEYSKWTKLWNFLISRNMFIGTLPGEYSAWRLLDTFECFNNSLSGTLPPAYGMWPQLRKFNVRDNFIAGTLPPLYQNWSALKFFDGSNNQLTGSIPREFQSWTTISTLRLSLNRFTGVLPPEFSSWVSLTDFRAHQNNLTGSLPPQYGAWTSVVNILCNANSISGTIPSSYGGMQSLKLFDASSNLLTGTIPQNVVLCPQLQIFSVGYNGLDGVIPPRSSPTIRVFSVQYNKLIAGSVPPQLFSAGIAVAVCGTLVCPASSSGIQVCLPQDYYFSRTQTFGDILLILTLYRWRCDAQDSTLSQSTTLYVDSASTSTESSTRMVSGSVGVATLSSILRGGGNGGNVASLQRSASVLRLASWCDASRTLNADNNEQLFTDVSDNPLGLSLPVQSVPLATAAGAAVGNALLVLVIGIAQHGLHVVQHHTAVMVLPLPLRSFIEQFPSSMLPGSLSGSYGSFMQPSLEACLVLLVSSQKSTAAWACGAVMIFVWLVFPAYCVYVILYAGRLRRTFVLKGVRCEHAILHLSSRNHTALRSRSKQYFYSLSHIQTYLMNATSKWAVRPATTGTAAQRREKQRIAPKQLLERMEGAFEGYVDRREWFFMVPWGLSILGGVVLGALTAMASDDASAACRASLWAAGVALLLGVAEVVLCVLLCPFTVRLELVATVTGLSLGVVGNALVLGGEDDVAGGVVSAAAVLELAITVLLLLNGFDRSCTSERSPENMTSELADGNGVITIAAHHPQQQRRISDNALLLGVARTSLVTTQQHLRLSEIVRVICDAHAVETVDTNSC

SEQ ID NO: 2654 - protein, 431 aa, Bodo saltans
MKTFIIGNNSLSGTIPPELYLWGTSIETFAVGLNALVGSLPTVLSEWTSIRIFDVNNNQLSGSLPGELGSGTLPAQFSSWTRLNTFDVSNNILAGSLPPSYAAWGQGMTFILVASNRLSGTLPPQFSALITLTDFVASNNSLSGTLPPAFQSLTTLVNFYVDSNPNIEGTLPPEYSAWTALRIFYAQFTAISGTLPSSYASWVALKQFQVYSARLTGTLPAVYSRWKVLVLDQLVVHNNSLSSTLPAEYGVLRIASYISLRNNHFTGTIPASWGGMTDLRHLQLTSNSLTGTIPQSLMNIQFLTTISVGFNSLTGQVPVPNVSNPSMALLSLIDVQNNPQITAALPTKQQIWATCYTAIPCTSTLLPYKLCFPRDFDFNQLLGLSNLQTLLGEFFYDCLHPPATPAPSPLPQCCCCRAARNERNLEKSKHA

SEQ ID NO: 2655 - protein, 1699 aa, Bodo saltans
NNAGWSLTPSNCSVDWFGVNCSGVDVVDVTLGSNNLTGTLPSSWWNMTNMVHIGLSANSLVGILPSEWSAMAMLSTLDLSTNRLSGILPGAWSAMTRLTILYLQTNSLTGSLPAEWSALTTLQALYLSGNSLTSSLPPEWSSMTQIALLALNGNMLNETLPNSWSALTKLEGLFLYSNNLSGTLPSSWSAMTRIQGLLLSSNSLNGTLPSSWRSMTLMSDLELLSNSFTGSLPPEWSSMTQIIELALYANSLNGTLPSSWSAMTKLSFLYLHANSLTGTLPANWSAMTKLRILYLQTNSLTGSLPAEWSAMPALQTLYLSGNSFTGSLPSEWFNMTQLSSIALISNRLIGTLPPEWSSMTQITSIALYTNSLNGTLPSSWYAMAKLSNLQLQANRLTGSLPAEWSAMTKLITLNLQTNSLAGSLPAEWSAMSTLQTLYLSGNSLSGTLPVSWCNMTRMVDLRIFGNSLSGSLPSEWSAMTQMGTLMASSNSLSGTLPRAWSAMTRLNSLQLQTNGLRGSLPTEYSAMTQIVSLVLNSNMLNGTLPISWSAMSTLQTLYLFSNSISGTLPSSWRNMANMVDLELASNNVTGSLPPEWSALTRLNNLQLQTNSLTGTLPPNWSAMTRLSILYLQTNTLTGSLPPEWSAMTTLQTLYLSGNSFTSSLPPEWSAMIKIAILVLNNNMLNGTLPISWSSMTRLQTLYLFSNSLSGTLPSSWSAISTILGLYLDSNSLSGTLPASWRNMTHLVNLEILSNRLTGTLPPEWSAMTSLRTLFLYSNSLTGPLPPEWSAMTLMGTLALYANSLNGTLPSSWSAMSKLSALYLETNSLTGSLPAEWSAMTTLQTLYLSSNGLTGNLPPQWSNMTQITTLALYFNSLSGGLPPEWSSMTQVVTLSLYSNSLSGTLPSSWSAMTRMISLSLYSNSITGILPPEWSSMTQIVTLVLYGNRLNGTLPSSWSAMSTLKALFMSSNSLSGILPSSWRNMTRMSDLELQTNSLTGTLPPEWSAMTLLGTLFLYSNSFTGGLPPEWSNMSQINNLALNANSLNGTLPRSWSAMTRLSSLYLRTNSLTGSLPAEWSAMTQMVTLILSGNMLNGTLPSSWSAMTKLSNLQLQTNRLRGNLPAQWSAMSALQTLYLSGNSLAGSLPAEWSIMTQVASLLLYSNMLSGTLPTSWSGMKMLSSLQLQTNSLTGSVPQGWASLSSLRGLNLGNNCLSGAVPPSLLWNLSGALTLCNTKLRGGTNLATRCAGSGWPSYCYRVVSQSTTSSTSHSLHQTDTLTPPPPLSRTSTPSLSLLDGSTTSSTSLSPTRLSKSTSSTVVQCAVAPPGTVDVWLAPPTNELLEVPNSGGLLSMIVSGTYARMNNTGSTVNLVGSPIERRVLASSSSSSLSIGLNISLLGPLSSVGYWKIGSVSSSVDHQLLSYESVSSNTVSWNAAVVLAPASGWISASVPLLVGQTFYVNVTLMCYGASTMLHVLVAVPAPGVPQQYAQLVKASSGYAQIASIIAGGASSGSALGRVLATRSMVLCNADAALGGGVIDLNVNICDIEGASDNTDDNDAAVTARSAIVSNILLLGCVVVAAVLLSGAWACLSSNKGPFQAATLDLCLPSSLLSVWIAVVPSCASSAVFLLARRATISSSSCVGVDVVLGVLGLLVAIVPCAAFALLWGVRVAGGESATWVCVAKHEEAKHNHRHHLLHRLLR

SEQ ID NO: 2656 - protein, 606 aa, Bodo saltans
MRKFCEQFRDVNAPVVTSRRPSSHYSVSVTTTSVTILAFVASLLIFAIARVASGQTPPSSSTNCTCYSAANQAALDAFRIATSGDSWTRDPWSPSSNMCHWSGVGCGGTDVTSIIVPRRGLRGSLPDILAQFTAMQNFDVSSNFLTGSLPSQLSSWTNVSVFQVLANSLSGGLPDSYGQSWKLIANFSVSLNALTGGLPSSYGNWGATLLFFDAGSNQLTGSIPPSYASWVHLEVLYMYLNSLSGSLVESFSSWSAITVIRLDRNKLSGSLPSSFSAWRRMQRLEASYNQFTGQLPSSYADWTNMEVFSVGGNQFDGTLPPQFGVGWPDTLIRFSVFGDESSTTTTRITGSLPVEYRQWRQMVSFDTRLQRINGTLPPQYSDWNRTIEVFLVGYNSLSGTLPETYASWSKMSNFAVDINSLSGTLPASYGAGWGTSLLGVQFSQNSFTGSLPAEAYAHWTNITLFATSINKLTGTIPDAYGSAWNRTITAFYCAENQLNGTLPDSFWLWSRISVFAVGTNNLTGTLPESYGPGWGDSISYFEAPKNELNGTIPRAYGTYWRNMSHIALTQNKLSGTLPSTLARWTKLSFLYLRDNLLEGTLPIEFG

SEQ ID NO: 2657 - protein, 672 aa, Bodo saltans
MESYVRRYLREEVSDRNAVGRALMRNHGKIYSFLPTEEGVGRADLWPELTDGKLENATNFNFMATLRGASSIPADQANATIRRASSAGGVKNGQHHRGALYESCQRPQWNRDTRHLDHGEDPLQKCLRDSLRSKGYHRDYESAKRDADSLRKAELERLRRKMQEQEYVARQLEQQRQLSQQWQEVLVMEKTKRDTLLRGERTIRLKFESEFRKTVSLVVELTEFNQRKRLFKLAMQQLDELKVLEREEFLEHQMYQKMQKQRELEEIRRLQNLDAQRRRNDEHMKRVHALATEEITARDRIVRWAVQKLVEFSQFELEGRDALLRREIMESIEYEEALQRQLVMDTRDRYFRGLVDSANSTHQEIEERLQKSRNAQFEKLRQDEIQRTRQRFDRQVVDLMQTEVLERSDVVTGAQKVMSSLTMEFLRSVQSLRYREQEAKARFIVAEEELKALRVLQRSFDDLANRALENSARRARQLEDQRMQQEAEEKRLQEEQRRQQEEQRRKSLLSEELEQKRIKDLRDKVERQNKPFLGVTLAERTEPELALLVESLYVDGPCDAAGIKIGDVFVTVGGIQVSSFSTMREAINQHARMGERLDVVVQRDEKNVQTSIQVLTADKEFSELKDIYFDTDRHGRHKREEASPTKPDKASQNSTPTASPGKPPLSRHSPRR

SEQ ID NO: 2658 - protein, 882 aa, Bodo saltans
MTMSRIYRFNSLALLCCVSICFLLLLPIVNGALTADQMTMLQTFFSSTGGAAKWTVFTGWDLAASAWVDPCATTDPVPKLFGVSCLSGQLQEIYLPANGLSGVIPPTFFDTFPSLSILELLSNPELGGPIPAAPASSLLEIVILSECAFNGTIPDSIFTGALTQLQLQGNQLTGGIPDSISNSRQLFELNLGSNHLVVGALSTAVINCTQLSVLDLTDCGVTSVPDTLSSLGGLTQLALGINSLTGSIPNSWCNMARLNFVFLQDNSGLSGTIPSCLYNWTALESLVIENTQMTGTIPEFFFTSFKKLTGLYLSGSKFSGVIPDMFDRVPNLQHAEFNGNNVDASYSGAFPNTLFGLVNLQSFSIQYTQVESPNRTMDALRSIQTIILASNPKMSVAFPSALLLARWTIPAPAGVQRTLVLANMPVYGTLPLVPSGQQIYDVTGGVSFVYTDITGYIPNATFDWVPSDQLNGVLDGCSKLLHPVPKWALYLTNNFAGLTFSLSSLTKADGTALASNIFSMSGGTTIGIAGASYVSMDGGYYYCGYCISGNTTFCESDDLNSVTADQMSANIVFTHATLNNISTIMFCNTPTVTRNMSIPVYLYYVGPAYTSATWYFLISSNSLSVAFYNPTPYFYALSPSEGRIEGCTTLYALGVGFFNAPNVTIRILTSVDIWVEGGVVLNDTAVRFLLPSANASAVNTKYRSYSDTPLSVDLFADGTPLGGYAISNATYTFATTCSTPLVECENGYTDDQDCPVQPLCRCFSEGQCLIPNGTTTYQCVCAGGFDGSGCRDCALGYYGSSCTLCDCSHGTCDDGIDGSGSCVCDSGYMGAKCSISKWGVGFGIPFAIVVVIIVALLIRKRHVNRLMDDPDYGMPMNSVRNK

SEQ ID NO: 2659 - protein, 716 aa, Bodo saltans
MIALSSFVPLLLLCSCLAITQVCSCPCAWRKGILKQLFDSTQGANWIDPWVIDSPEAPCSYSGVFCVNGDVVTLNIGARNLQGPFPAFLTELGNLSSLQLQVNGLTGTLPDGDMGGWKTSIINMNIESLQITGSLPESWSQLTSLRWINFRNNPKLTGATLPASYSSWRPEYVDGGACGFTGPIPPTWSQWGAGIKTFTFDANQLTGGIPDTLSTWVNIETFQVNGNLELGGTLPESLSTWTRIGTFYVSFCDITGPIPSSYSSWTTISVFYLDRNQLSGSLPASWSRWTNVTQVHLQRNNLTGMLPHEYSSWGASLLDFTVNANSLTGTIPASYANWSMLQRFLCGANNLTGTVPEVFSLWGSSLTAFRVAGNALSGTLHDSFSSWTSLAVIELDSNEFSGTLPASYAHWNRTLKEFYASSNRLEGSFPSEYSAWFLIERLFVYSNYLSGTLSPAFSNWRFLQRIMLSNNRLSGSLPSEYSLWGFPLNIVYMTNNSFSGALPASWANLKNISELVLDFNQLSGPIPLSWATMIQLGTLMLNNNRLTGTIPTQFGNLKNLQFLMLNHNHLRGALPSSIQWTQMFVITLQNNSKLGGNIPPSWTNGFLPLSRIMAVCGTRLCGTAAVLGLTFPCFPSVQLIDMTVTANNAVATRFVNLLITSPSLPKAPCTSDDTSTQSLAPPEPVVPKQPPMPPGVASGASAAATTANMACVFTGG

SEQ ID NO: 2660 - protein, 133 aa, Bodo saltans
MYLYCNQLDGGLPDEFRSMSALRSLFLNGNQNLTGSLPSSWGTSTNILRLASFNLQNTSINGSIPPTWSSVILPQGVITLCGTDVCGAGGLTGSYTICIDDVAACDPKKTIVFYCTLSSLSAACVFEQQYSCA

SEQ ID NO: 2661 - protein, 489 aa, Bodo saltans
MALPSNENGCNLFAEITCDGNGAITTLNFTRKGLSGTLPVSLANLSSLKYFLVSNNSFSGTLPSEYSLLRNLTTFTVSSNNLTGSLPPKYSLWGASLLYFDVGQNNISGTLPAAYSNWSKLYWFQVKVNQIIGSLPPDYRSFTAIEYFDVSSNMLSGTLPSSYAAMSSRMSLFSCENNMLSGPLPPLYAQWTSLTSISLYDNLLDGPLPAEYSKWTLTVYCNIGYNNFTGTLPASYAAWTMVRIFSVSFNNPSGTLPSEYVAWNRSISRFSVSKNHFSGTLPLSYSDWGASISTFDASTNSLSGTLPTEYQQWSSVTDFSASNNRFSGVLPISWNAQMRQLSSLFVANNLLEGSIPSFASYPQLKVLILAFNNFSGTLPVAALLPTLQALIAQNNSLLFFPSALPKNLSLVTGCGTNLCGIYSTYFPIFFSSCLPITLLGAPSFDLTVALKAAGSNLFVAPPCPTTTTTIPTTRVPHAASGATTNGDRQ

SEQ ID NO: 2662 - protein, 324 aa, Bodo saltans
MMKRSLNRCVTTRPSAKKRKSLLLVVVQLTFVSLLFTFFSLVITTAHVGAACSCQDQLAPLSEFYNATDGPVSWANKWDLTSTSAPCGFYGVTCDDAAGAITSIVLVSNNLRGSLPKSLSLLGSLFQVFVVNNNAISGTLPDSYHNWTNMMNFSVKSNLFTGPLPSSYSLWQAITSFNVGTTNISGTLPLAYGTSTGWCTSLNIFAIQNCAGINGTLPPEYGNWSNLGVMNAEGTGLSGPIPAEYAQWRHIDTISFTNVLGVGNLSGTISAKLSSGWVNLTQLSLRGNKFTGSLPHGVAPGEVIWPKMRNFVLAQNQFGGTLPV

SEQ ID NO: 2663 - protein, 137 aa, Bodo saltans
IYAVHLYSNQLSGTIPNDLPRGWSNATTISIGMNTLTGTVPANVADLFILTKIQVLATGIAVLAPYASSCVPPPSSTSLPSLAPRPVVVPAAGVGNMSSLLGPETRFIGTTVAAASSIAVSSSNGAVRGAVPSADLL

SEQ ID NO: 2664 - protein, 2575 aa, Bodo saltans
  misc_feature (1322)..(1421): Xaa can be any naturally occurring amino acid
MPHSQSTQAIFTSAKRKILNPLGERWKQHYRERTLLNYKMKKGERFLVLPITTANSAQELLGLESKYIRILKSTLNVNKRTPLPKFSRPVEKHNPNRKKVQSYQQNEDNHMKKFYEEFLKKNESQQFSIGEKLNPRKAFLLREYLMINNYEGQRVLKMLQLRSQRQSNRLSLHLTLSHSSLEQIKKTILDEDIFPGSLDDLTKLKVQWKYLPDVGAQLINTGTTVNSTTLYPLTACSCSSFQGLYRVNDHIATTLEDFMSIADIDKDMHKVVLEVVHAGTKFRPAMSKADSRYTLQCELLQFCESSKFDAERAKRYCDLILQKFDSIQRGEPDERWKIFLRSLHQDYVVTACDKCPQTFAVICKGLYEQSLREAVETFEPVKNIEEVAVAIQKFNDLANSLHAQGTNSSELPHLYVLPKMHKLPIDGKTILAKLPTRTILGSHFSADNNAPTNYTYRIGKLAGRLYTALLYGAKEVNAHHMKTKKDAINKFFCVLTTQEFPAVVNENSEFLRMKDLEAIDLSNCYTNLPQELVLEAVVFFYNLSESFHARKLLSKNRMRCDQLQLSLHYSKNGKYEGHSWQEKGYSLDTVIQITKLTLEEQLFKCKGGVYRQTKGCGIGAYQAWGQAQLTLAYVEWKHITEKVKYPDWLAAAVRCNHLRHVARFMDDRIQCVQSSALLPTEADYKITYSSREQGNVISFIGYKISTVPTTTIEYSDKQHKFKTLEITRFPYYGSAMPSSVFIGTVTGRLTDIYRATTQAKKQQVRNTMFYTDFIKGAAEIFAQVLKRETPLQFIKSGIDKFVSRNIEATNRPIVKRQLLDKLFESQMLAPAPLQTIPSQHIQQAVQGTVLEEQVERLSTARPSKEKSLFSFSNASGTECAFNAISVLVLKLIKLGIPLQKTQENESNLRLIQDYVRCIRHDNRQALTTATKLDIVNQVFKCDGSDITELLQRLFELLSHRAENGEPHDILKFYFGPTLVTNVVCEKCGPQQAELWTEQALPIKVPDRSTKDLTRIGRHVVVDDRLVSQSFNIQAPCIKCEGQGVQSISNVRVSMRTTPYVLPIRFMREEAEHPAAIKLAPEILLNGAKYRPIWAAVHSGPNSRSGHFRSLVYDDKVWKLCDDEKVTNFDEELAADDINKGHKIVLAVYLNKDGIFGEHNSQENIRYSIDAVLNEEILTPWNCFTEDDNCTTPPPGLAPTNNHSRAESEAPSPPPGIVSRDSSEKSLLPDTQYRDTIAWRLMTSKQGKIPRAPSFYGQGKNQQKNMKNRNKGSRNHNKFSTSRDSGNWNTIRYNNSSNYNYANKNFSESNQIGKFSGKGRLTXXXXXXXXXXXXXXXXXXXXXXXXXXXXXXXXXXXXXXXXXXXXXXXXXXXXXXXXXXXXXXXXXXXXXXXXXXXXXXXXXXXXXXXXXXXXXXXXXXXXLSGSLPASWGNITRITTLNLNHNSLSGTIADSWLFSPVTTERSWYLSGNRLNGGLPEYPSVTGLGAYFDVLDLSYNRLSGSLPASWGNITRITTLYLNNNNLSGTIPASWLSSPVTTQRSWYLSGNRLNGGLPEYPSVTGLGAYFDVLDLSYNRLSGSLPASWGNITRITTLYLNNNSLSGTFPASWITIPGYYYNTRSWYLSGNRLNGALPEYPGVSGVGPSYSVLDLSFNILSGTLPPSWGSISNILTLYLNHNSLSGTLPASWLSSPVRTQRYWYLSGNRLSGLPEYPNTGGISAYFTVLDLSYNSFSGTLLASWGNISNILTLYLNNNSLSGTLPASWLTSSTASQRSWYLSGNRLSGELPEYTSTAALGTSFSVLDLSYNSFSGTLPVSWGNFSNILALNLTKNSLSGTLPTSWLNRFYFFWDEAPSLYLSDNSLSGTLPEVLWNFFPLLPTDRVSTLDLSNNHFYGTLPESWGNLTSEGFGFGFQIQSLSLSTNNFSGTVPATWGNLYLVGMDLSNNNLSGTLLPSWFNRNDNRYYFFYSGLSVWKLRNNHFSGVLPEYRRQDDYDFSFLDLSYNSIAGSLPSSWGTMSNLNHLDLSHNELSGSIPPQWSAMGYSQARVELNFSFNNLLFGNISVPLSSATQQWCIDVFNTHINSSFESENGWNCFAPPTNAPIRAPIHSSTIVPIESPLPPAVTVKSVAQVSSGVGAALAVVAAAPSSGFAVDRLTTLSGFGDCSDAVRSTVQNVMNNGVPTFLDAPLQLSFGDEFGASQRGTVLGNLLMFIIASIVALAAVVVHRCTSGTRRHAVSSLNKPLLLQSAAALRLPGATIVIVVLLLDSLVASSVLLVGYGTNASDIALGAFGLLVVAVLLIVTLYVLDPRPLAFQAIPVALEHVTVSDELISTHGLRTRIAVWWDRIKTPSNKWEARKVRNLFVEHFGYLFEGCRGGRHWWILVEASTTIIVSTLSSVVPETEAACVTRAWIALGLMSIILVACVAVWPMNTHIETGTAILLLCAQVIVVVCAIGGVGNVADIIGLSVSISSAAVALLPIAWWMISFLQTCWNWNKKKAPRDLLLEMRSWSLVPSERSSSSKMLRRSTSIPSATSFRGNSEVVTTPDSLRVMIEMICDTHQSSSQTKRDSNMKNAVIL

SEQ ID NO: 2665 - protein, 397 aa, Bodo saltans
MALGEPTHLVGSKSTRLSLLLQIVPVVVVLFTCSAASASMCGCEHRYALLMNLYTATNGAGWYNKAGWNSANCSTDWFGVTCSGADVTSVVLNENNLVGTLPASWWNMTNLQVLTLYLNTLAGSLPPQWSNMSGLQELYLYNNKITGTLPAAWGSMKQLQRIELEINLFSGTLPTEWSSMTALRTLAVYLNKLTGTLPSSYSTMTDMENLQLYFNTLTGTLPDSWSSMTRLQLLLLNSNNLSGTLPSLWSNMPSLQQLRLDDNSFTGTLPATWQSWSGMMYISLRGNSLNGTIPASWSTMTVLSYLYLSYNSFSGSLPSSWSNMIAMQNLNLQSNSLSGSLPSSWSSMTALQTLYLSINRFTGSLPSSWSSMTLMVDLDASVNSLSGTLPASWQSMT

SEQ ID NO: 2666 - protein, 880 aa, Bodo saltans
MSRIYRFNSLALLCCVSICFLLLLPIVNGALTADQMTMLQTFFSSTGGAAKWTVFTGWDLAASAWVDPCATTDPVPKLFGVSCLSGQLQEIYLPANGLSGVIPPTFFDTFPSLSILELLSNPELGGPIPAAPASSLLEIVILSECAFNGTIPDSIFTGALTQLQLQGNQLTGGIPDSISNSRQLFELNLGSNHLVVGALSTAVINCTQLSVLDLTDCGVTSVPDTLSSLGGLTQLALGINSLTGSIPNSWCNMARLNFVFLQDNSGLSGTIPSCLYNWTALESLVIENTQMTGTIPEFFFTSFKKLTGLYLSGSKFSGVIPDMFDRVPNLQHAEFNGNNVDASYSGAFPNTLFGLVNLQSFSIQYTQVESPNRTMDALRSIQTIILASNPKMSVAFPSALLLARWTIPAPAGVQRTLVLANMPVYGTLPLVPSGQQIYDVTGGVSFVYTDITGYIPNATFDWVPSDQLNGVLDGCSKLLHPVPKWALYLTNNFAGLTFSLSSLTKADGTALASNIFSMSGGTTIGIAGASYVSMDGGYYYCGYCISGNTTFCESDDLNSVTADQMSANIVFTHATLNNISTIMFCNTPTVTRNMSIPVYLYYVGPAYTSATWYFLISSNSLSVAFYNPTPYFYALSPSEGRIEGCTTLYALGVGFFNAPNVTIRILTSVDIWVEGGVVLNDTAVRFLLPSANASAVNTKYRSYSDTPLSVDLFADGTPLGGYAISNATYTFATTCSTPLVECENGYTDDQDCPVQPLCRCFSEGQCLIPNGTTTYQCVCAGGFDGSGCRDCALGYYGSSCTLCDCSHGTCDDGIDGSGSCVCDSGYMGAKCSISKWGVGFGIPFAIVVVIIVALLIRKRHVNRLMDDPDYGMPMNSVRNK

SEQ ID NO: 2667 - protein, 249 aa, Bodo saltans
MSGTLPGAAIANFTLMGALDFSNNSLTRTLPLEISTLSASLQVLSVFSTYISGTLPPEYGALVHLQYFNAWRMRISRSLPKEYSTLVNLLTFDVAYNTINGTLPPEYSTWTSIQHFNTYETFISGTLPSSYDAWTSIVSFDVSRFLISNSISVFSCERPKLHSGTIPPEYQFWAATVITFNTCGNVIRGSLPPELGAWKVVQRFLHYNNLLTGALPPEYGSWGSSVNAFYVYNNLSPERFRHSTPSGVT

SEQ ID NO: 2668 - protein, 2301 aa, Hammondia hammondi
MSSGLWQIFKRKGKDGDEAETKATKAHMGEENKMYYNEKLKRWVVRGEEHLVEQEQLPPPPPTAAALQKPRSSDAGAALPSAGPRSFARGRTARSLYTATPGLSVKPAATSTAASLPKPAFVLPPFAASRLAVSPPSLCQEAPASSLPPATPEEDRANAPPASRDNLGERLDSDAAGKVCGEARSTDKTGQDSSLGEHLLKGENLSERQSPRPSLPVFSSDPVSASGGFSEAAAAGGARSRNPSGIDFEGGGTLDEVHLGGSAVSREPPSPFLSEGKRSQPFCCEERSDGQGTHVEGSEPSPCVAPETATASRFGLPGDPASVCLSPPLPQLLSTPEPAQAPPAALMPPSALPNGDAGPADGDLSFRTAFVSSQLADGAGRASSRGETLSLHASGRPRGGLSVALESSSGDEGETSSVTLDDSSEGSLSWRDTWRPAEEAVGHTHRRVSGGETADAACPLFARRELVRDRQQRNRRGSALETRDCGRGRRAGTPDAAGSLHTPAYAAALKEWMEEPSCPREADLAHTPKDEKTQQDGEARPEELRSAHAGLAGPRSEGQVSGQPNGEVAQRTEVAIPETESNDISFPLHAPVPAELAGRQGSEQVCPPEPLCRQPVECLDIPEDIEEDLVLQDLWSADHVGMREGGNETRESEFPEDLRGVSEPFNPCPVEASLSVPAVSLSPIAPSASSRASVASLAPSAASPPSHCYSTELLTQASRKRASLGEEPALQAAAFQDDRGSRFGESPVARAPAVALPAVSLLGRFEGFRDEPSPLGTHRTQIFHLADPDDAGVGASSVVSPGGFALEPQDEAGEQNLLRVEAQAAQGEVSGALGSSLAENAQGSWGEENGEARPPALDAVDWFYRSDAAGEKHIQEQALAQAQRAAFSNDFEAAESASVFCEEGALQREGVIAAFSASVEELERTSGTALEQLQEQRRLRLELERKNALLQRQLHAVLVLLSRFSLSGQDRRRLLHLLQPAASPKSELLHATLNPNRREETCEDPEDTGARYLEGTVAAWTETKGEKAMNCLESEVAALASWSNGRGEDRDWMVTKDVLDEERGHQAGRCLSQHTIDAAQLSGDEEDADFDADLVEADEVREAFNTLTQLLASQLEMQSASRAELEVCQAEAEGYLLLVEEQQKQVIEPLCRRVAELQREHAEEKRQTTQLRQAQEELLRRYEGAAVATEDLCMQVSRSRAEVATKTSLIARLEAEVQEQQTKVGHFRDALDAKERELENAAGALRGLHAQLDSERNRRMKSEEEQRRREREAAERHEAATRALAREKDAEALSREQEVQEMRAELEGARETLRNARKEAEQHAAENASLKEKEMRLQEEWNRRVTSINDELEAVRAMHASEKAQLSEAHHATEHAFATFRQDATRREEEREQEIQQLKEAMKKVEEDQRGSLQPETAKQLELELDAARTETDSLRREALELRGAAECLRMQLETSRADQQQAAAAFEDRLRRAVEEEKEAFFAERRRAEQRHAEALTSLRAELSRDEEDRAAHEKLAEKLKACECALARERAEKEEAARAWQEKLTLARRRQEEQEEEMRNKQAEIDVLNSMQDELQEHLAELRSRCSQLSAKEEEAQRGRDEEVASMQRQLAETAEAKGRLASELASLREVYAQQSEEQKKQLEDQSLSLQASEREVADLQRRLEAVTLDVERQQQEAKAEHVRALEAKHSECMRRAGEAADASERAEATRRLLETVQTQLEEEEKARVAVERELEALRAVVFEKENALAAASTKDEELAQVTAELAAQEERVAALRRELEDQAQQFVASEATLQAALSEAEKKSLACEVRMREELQNHAVAASRIKAEEESRMQFVLEQEKKKVAAEEAEKLRKTFERLWDQESQKMLQAYEGVARQLAEAQRAMQAKGEELEEVKKREEEARRAALDATQEASEAKELRERLAQRDAELSELRAANKEQTEELATLRADQTRLAEEVGRQRESLEMQRATLETQRDTLEKEREVLRGQVEDAKDRERERTRQTEERESCLRRALAEREDDARQKTLRLQVLEEELETEKRRNALAENRRGEEIRRLQSAVNELKEREKEEKKRVETETAEFSGRLRAAEEEAERRQRRTEELLAELDEARRVPPTVEGVKKQAQLIATQNEELRMRTATLSTTSDFLSRRLQFFEDALDSLGPTGRAIVLEADRCVQPPEPVDAEAIPNEVLPAAVSPPNEQTRGRFLSPHAVTEFGETTLNGTSPAAGGDARNISLPVEKLQMPPLPADGSPKVSDGTRRPPKPPAFMQAFLPASGRSADASGGPLQGVGPGVNGG

SEQ ID NO: 2669 - protein, 344 aa, Bodo saltans
MLPFPLARQQTCGLLAAVVQCVDKSWIFHVSLNQLSGTLPSEFGAWRYLSFFHAQYNNLSGSLPPAYCAWMSLDWLDVRDNQLTGTLPPQYSSWSALTIFSAGSNSLRGTLPPTYKNWSALTSFDLSTNNLTGSLPFEYSSLVSLSMFDVSSNNLSGTIPVQYAAWKNIVNVRLDSNSLSGTLPNSLFGGWTFVVDINMRMNRIIGTIPPALLARPALQKLYLGHNMFAGTMPSTIAMSVVLLDLQNNSGLVGTLPFRLMLVTVCGTGVCSTASLPLQYCLPPNAAELTLTQVAPYATTCTPSNEPPQSTATPSAINSTAGNTSSSQQSLARGTRSIGAAVAFA

SEQ ID NO: 2670 - protein, 278 aa, Bodo saltans
MYFRWRAALCSIITLMVDGLPFQVEVEVMAEFFVAVRYTNTTPVTPDNLCTSWTPMIVCSSDEKVLELNFTNANLKGTLPSSLSQLEYIRSFVAKNSQLTGTLPASISNWTKLNYFDAHIDKFLIANNQLNGTLPSAYSALARLQSFYGDYNMLMGTLPSEYSQLTALGTFSCSNNRLSGTLPASWRTLLLMTELSVTGNSLSGTLPPEYSSWSMISFFEVDGNALTGTLPPEYANWTMLHWLVVNNNFLSGTLPVEYSVNQILFLRLRNNNVAIRIF

SEQ ID NO: 2671 - protein, 668 aa, Bodo saltans
MDLSHNRLGGSLPAEWANMSALTIILLRNNLLTGTLPGSWGALRFVTTMELSHNILQGSLPVLWATYNLLFSLVTKLTLLNISNNCLEAPIPQQWTQRFQFFILTIDNCQTRVFLSQNTTASLRVLCRGRWPAHCDSASVSLILVPSPSVLHATPTANFVSAETEHLPSATVTFANSTHSASAQVFTSSTTSQELPQEVLSSSVLQLITKAPIVATSFISVMAGAEMGGSAQALLAVLDSPCSCSVIHDDGSRTNTQSGGAAVALSPLLLFNDDDDVGVIGPFEVALGNVGISALILLLNFVGAALHGIHRQSKAAKCSKFAADAIKQSPQIFTFKGVAFSPSGAVCRFPSLGLKLVTFLVPGMAWAVAQLASSYLHSEVLHQGNDQLVTTTATELAVGVLVVGVFLCALAVFLKHVILDQWIEQQGPNKNKGGGLVFESFDDWNPFSPPIPRQLASIVCSRSGQWGPTDRRRAFGSPVANAYLPSCVRWAWAVSPAVSLMGVALSSARPASFSTAATVCDGLQAAQVIIFCGGAMAFAIMLPHRSILRSLLATFSGLTNTFVVLLGLLCRHRRVNVDVPLQVSAVGAYVSLIGSIALFSLDKFEARVLATTARVDNRDKRRKQTERAQCGNMPVTRSPLWLSQQAALKSLLCIICSTTSNPSAQNMY

SEQ ID NO: 2672 - protein, 211 aa, Bodo saltans
VSCVLLDTLELQNNQIAGTLPDAYGTATSALTTFLVDNNKIKGTLPSSFGDLFGTSLTLFDVSNNAFSGTLPLAWKTWSQVSRFVAVGNQLTGTIPPDWSLWNNSITYFDIGGNGLSGSLPRTLRAWSKLMFFSVSYNKLTGTLPPEYSEWSSLHTFWVYGNSLSGPLPAGYSNWKAIVTNVGFSMNQFSGTLPESWSQWGSLSNFDVSIN

SEQ ID NO: 2673 - protein, 288 aa, Bodo saltans
MFSRSSKHLSFATTFVLVCFPFWNQFFSLEGVPLSFHTVLKRNKKETMLTEAQLKFTESVQAALQNGLDNKAFHYDHDYELDSVPAAIKALRPVAEVLHIDNNFRLKEIHPGVGDLSLLRWLNVSYNKLEEIPVEVARLARLDRLYISNNELAFLPLELWALKNLEELRLDSNKLRALPTYVLFLPKLRELLIENNPLLTPTEVDGAETALLFPPQRVGDCASCSIRFAYNSICFLTFHDVCGHKSLPIVHYVCSERCKEQLQERLNHYDVQLKRTEEEYNSPLRARD

SEQ ID NO: 2674 - protein, 589 aa, Bodo saltans
MLHLIFVALLLTLPAATLGKEEWCSAEVDSTSATVKASGRWADVEYQLGYMVGLCTDSSSSEFGTFVAVVNGLTQRQTVGLSGTLEFPGNATVSFLLDKPSKGPQYFNLNISYGGNNNFTAVLCDKIYSGVVGPCVVDSMLPILILLLWILPGAACGLFLVIAYIRKNRYDRELLLKEREVNIKQGWQSPTTLRMSTSEQHMDGIGDASPEARTPPYRDADSEDELKSRQSTVRYYEHPLDGTLRPKKGEQRESITDATTQQGEATEATERRNADRVAAEYLMAQQLEADRQVALSKTLAALQIERVEADRIESERLTATLIEEELLEEELLEAEELENQRLAEAKREAARLEAERLEAERLEAERIEAKRHEAERLEAERIEAERLEAERIEAQRLEVERREAERLEAERLEAERLEAERQDEEDRQEAARAASRKLEEEEMLAASVSYNAEYRDLMMMLQKPDAKERAKAFLGFSLAQSVEESKLVVDGVYRDGPAFQVGVRMEDTLTHIAGTRVSSIQEARVQVDKHCRPAELAALTFLRPTGESYTVKLWVMTAEPKYRGKAYFFDTDIHVKDQSPRPKHRQNAD

SEQ ID NO: 2675 - protein, 959 aa, Bodo saltans
MGSLHPNVEYEHKLLGWDSSKNYSSWRFIATFDVSSNTFTGSLPAEYKAWTTLHNFVLPPEYSSWNATTTFDVSSNMLTGTLPSLYSTWGTSVETVLFTSNSFTGSIPPSFSAWRRIVSFGASNNNLSGTLPEAVSAWTKITLFVAGNNMLEGTLPGAYSSWSSLARVSLNANRLSGSIDPLFASWRSVSVFDLSNNHLNGTLPSELGAWTALGWFSVTNNAFTGTIPASYSAWMSVTSMTCSNNQLNGSLPPSFESWTHINTFSVRSNSLSGSIPSSYGAWSLVEHVEFTSNGFVGTLPESLYAWRQITYLSVAQNCLSGTLPALIGEKWNKIASLYLSSNAFTGTLPSTMSLLKSTLTILTLNCNNLSGTLPSSFSNLSALTDVAFANNPKLTGTLPNSWSALRLHSLSLQNTSVYGPIPASWTSIIVSGGVVAMCNNLLCGGAGGLSPIVFCIDDEAMCSNNASQTYLQSHAAIALLSSLPKCPEQAPTTGPEHTHSSTFVWDPNADFAPPTVALVTVLEIARTPASVLLGVVTGSAQGALMLTRTAALAHIVHCDAAVGTSVDSDTLSQVVRTGAAYLGAFLAISIFFALLVSWHSRRRCIPAARAAECLHLPGHAWCVVSGLIPAMLEFGLTISLLVSGSITNQYSDVGSAIALDVVLLGTGALPFLWQCSVATWRFRAEWRHTADKKESCCAGKAKKKTHRVTTLVDSCRAFWMKHHHPGKWIDAPSAYTYTTQRPTSFVEAYGPVFEECTNKRVWFVAWESGLAVLTSVLSAVSSAASSGRCDAIGSCEAIQITGALLEMCGLFMLGVARPQQHLQDWMVAMTVELIGFCAGTCLLVAAMLEGPASDNWGSASDSILQVQFYLGFLIFMVDAVLSARCLRALRRLCFVERPLIVPTLAQVKRRSAPLTMRAPKLRSRSTDTGFEKQFCVVCSTINLQAMIELICDSRRSSQF

SEQ ID NO: 2676 - protein, 243 aa, Hammondia
MRAIRSVVGLPVMGAAVFLGLLGGELPNSSVSPVPEVASTPFLLGVAADGDGGKNYAEVAKVEALTNMISTPIELFVKDLWQQLFHKSGKPMWEQMLFKVGSMIRHRAAHKATLVIMWELRHFLYGTAKVNPSAWKKLEMKFEGYLRDWWLTVPEDPWAALHAGAWKSLLKLYNEDLEPLLRGNPKLKDLENILFDSKLATIRKWTDEAHIEVMKGRTFNMVPQLEALSAKMALKQTAMQGKQ

SEQ ID NO: 2677 - protein, 892 aa, Bodo saltans
  misc_feature (680)..(779): Xaa can be any naturally occurring amino acid
MTLFYRLLLFTTIQLLPALLSSEYNFAAASMCGCQHRYPLLMQLYSATSGAGWVNRSGWLLTPISCTDDWFGVTCNGNDVTEVDLHANSLVGTLPIQWWNMSALHLLYLYSNSLSGPLPPSWSAMTALKYLELHDNGLSGNLPDSWAGLASLQTLNLYSNSLTGTLPASWSSLSNLQTLGLYSNMLSGTLPETWSRLSSLSSLFLFRNSLVGTLPASWSGMSSMADFELHSNNFNGSLPDSWSSMSALRSLIFAASGVGGTLPASWSNLTSLVDVQLFNNHITGTLPGSWSSLSRLQILLLNSNSLTGTLPSAWSALASIVNLQICYNSLTGSLPESWSTMNILQDFRLCGNSLASTVPRQWSNLTRLERLWLSLNSLYGTLPAAWSSMTNMTHLELYSNSLTGTLPSEWASMVALETLYLHVNYFYGSLPSSWSNMRGMNDLQLYSNSLSGTLPPEWASIVYLDTLILHHNNFAGTLPAGWSSMTRVSNIQFYSNSLAGTLPPQWASMSSLVTLYLHLNNFSGTLPPAWSNMSNLVSFVTFSNRLTGSLPASWSSMAKLTELQFHSNNLTGTLPTEWASMSSLVTLFLHINDFSGTLPIAWSNMSNLVSIVIAQNRLAGSLPAAWSSMRHLSYFDVSSNNLSSTLPPEWASMVNLGALFLHFNDFYGTMPEVWSGMSSXXXXXXXXXXXXXXXXXXXXXXXXXXXXXXXXXXXXXXXXXXXXXXXXXXXXXXXXXXXXXXXXXXXXXXXXXXXXXXXXXXXXXXXXXXXXXXXXXXXXERRLDVVATDTSNTVPWIAVWLQPPRDSSSSSYDGPRSWINNASTTPVLSSTSFTVVLAFVCDGNDVVLRAAITVPCPGVPRAYAEQVQTAGGYSQIASIVAEVRLLALRWAE

SEQ ID NO: 2678 - protein, 673 aa, Bodo saltans
MLSGILPRDYSAWTNVREFVVFNNKLNGTLPSSYSAWTIVDNVRVDNNNITGTLPPQLSAWTKVQYVSLNDNLLSGSLPPEYSAWSQINWWNAAGNLLSGSLPKSYATWTKIHIFYVPVNRLSGPLPREYTSWTGISEFEISRNSISGSLPEEYGSWTNVVKFSVDTNRLSGTLPASYKQWWKLQMILLQTNSLQGTLPAVYGGTELLPSWPFLQQFFAHQNRLNGTLPESYQYWSQLELFYVSENQLNGTLPTEYSRLVKLQELGVHNNTISGTLPTEYSQWTGIQKIYIYLNRLYGSLPAQYGMWGVTLQEFAANDNQFSGTLPASYGAWGFVSLFNIGANSITGSLPYNYSNWLRLQTFNASANRLAGTLPPAYSSWKRLQWFSANANSLAGSLPPEYSSWQKLQLFSIFANSLTGSLPPQYGSWILLTTFKAYVNSLSGTLPVAYSSWIVSNEFSVEANLFTGTLPSLYANWGSTMLWFNVALNSLTGTLPAEYTRLTKLQYLYVSHNSLSGTIPAALLSSTPAQAMLLSFNDFSGTVPSACSATLQMLDLQNNSQLSGVVPQQLFGFVTVCGTQIMCPTGRPYVQAACLPDDFTYFTTTSTADATTISPYTGACTNTPAPSRLRHTPTQSKALPASPRSEGVVPVFFLTCRTTRSCPAWFLLNNCLDS

SEQ ID NO: 2679 - protein, 176 aa, Bodo saltans
MNALNSTVPQALFALPALKHLSIGLNEFTGTIPSVISMSLVFLDIQNCSGLVGVLPFRSMLVCPTALLPFQYCIPANVVDLFISTEIQDLATGIAMLAPYASSCVPPPSSTTLPSLAPRPAVPAAWVGNTSSLLGPETRFIGTTVAAASSIAGSSSNGAVRGAVPSVQRAAAAYYA

SEQ ID NO: 2680 - protein, 619 aa, Bodo saltans
RTRLNTSLTQLYLNSNSLSGTLPAEWSSISDVLTFLDVSRNCLSGDVSSSWPSAKLLTCDTKLRGNNNSACLRGASWPRVCDTSTPSRSDSRSQKTLTEFATSHSPTYSMQSTADTLAHSNHSFSRLSVSFSWHQSLPREQSISDSGEIAAEAAFTATTVAASAATTAATVSIMSGAGDPSQSMSLVILALLECSKNPPVSVGTYFISVFFGLGNVAMSLGNIGLAMVIGILHAVIARLMLSLQTVGSSDDDDPWLRLECAYFPGWTIKLQNILFPGSTVGGVAGAVASASSSETASCIIALVLVAAFIAVQIWIQQRVVLSSRATFVPYTTYSVGLLLERRFLFPSARWETAAIRRAFSPLIGAMKTGYSLLSMADLLLACCVGAVSGAYLGGACDTPLLAIVAALYFLLSCAFVDMRPCRLPLDTVIVPMNYFFLGCICALKYDGNRGADVVSGLQLTVSVLQIGRTLCTLYVTMYREPQLRLDDSPYTGVRSVDDDAEEHDDVDIPLLLYHAVATTATSSSGKFTEVTSIPHAPPGNSKEYIPPSLPSSVATPMDDNHFLANDLSGPNDTLYWDVNGHAIVKCDKIIQSSAHQHNELSGRFFDVPDYMLEDKRFEV

SEQ ID NO: 2681 - protein, 397 aa, Bodo saltans
NSINLSDNSIEGNLPDDWSALKSLTDVTLSRNSLSGSIPSQWRRLTSITTIDLSMNRLAGSLPPLWGSMKTISLIDISENMIVGALPPSWFEMKALENLQLSGNRLNSTLPSNWGAMPGLARLYLDDNQLTGTLSSSWGNMMTLELVSLRNNLLCGSLPSNWSAMAKLTTLQLGENRFSGGVPRSWCGISSVNLSSTCLSGDGCPNSNSSTWEYCKTHISVNNTSQSRSCSLDDNNWPSYCDATPTLSRSSIPQAHNDTISTFSSDSPSKSTSTFSMPLSSTVTRTGRSKSCCSIPLTDTVTKFSSDSLAQTLTALLSRPSLTVSETTTQGITFSILPSSTFTRTGRSLLLSVTRSVTKLHASTTINLSASKHTPTRTTSLTLSIELPLPVSYAAAA

SEQ ID NO: 2682 - protein, 1212 aa, Bodo saltans
MNRHGASMCTPVAVTVALCFFISMCQLCAASTSLDEECAALILFYRSLSNIASPWTNSSGWEAGASSSNTATVSSCCSWYGVSCDVTQSTVVALQLVDNNLQGQLIDDVVWVSQLPNISIIDFSMNPITGQLPASFYAFQRLTSIKIEGAQLTGSLPLSWRALPSLLNLSLSYNHLSGSIPDEYSEIATLRWAYLGHNQLSGSVPKWNTCTLLLCGNTAMSTDMDTMDWSSYSGAWKKCKAGVTLYLVGIGLTGHVPCIPNVTLLELSYTAVKGPVPCCNQLTHLGLPAPIQLTYLGLEGCANVTGFWQDTSSCPSSPKLEMLGISGSGIRSLPVDMNSRFPSLTMLVARDLYISQPLPALPRTLQVLDIAGNAFSAPTSAAAVINISLSHFVYMDLTSTSSGGITLVDTVLECVDQASDTSHSGSNCAVKLDVFRAISKSLFEQGNPPPSTMTTSSSSSGAPDTIPASLVLQDYTAVPTPMMMVFPNYLIGFHTILTFMSPWFTGMYNPRLMVDQYLPHVSLADNAFSSTGALPLAWNNTFAPILPCPSGFVVFDGLAQTTSSLLFGVVYRLDVTFSYKPVRLPNRAIGTYTKDLAGGTVQAPPCNPTSLYAVPLTTVCAACPPLAVCDGSSLLHADGLVWRSKASYLPFYTCENNGCVQASASNTSVQRDGTECAGGFTGPLCSVCSANHGLDTTGNCVSCSANGWNWTILVVGALAFIGAATFASLNGVPQASGNVHSVAFQEQHHNEKRGKEHAPKKILSIDEEEEDPKDLAAVETLSEEKAHSEEEHKDQLAKRAAVVVKHLQNHLGMFAAIGRTVYAKDRSNPSVAIQTIQQFASQISLRSISFVTCLFPDFTSITQFQALLIIIPSLTLLELAVVRWRRQRWAWVAVTSSVLLLLYESTITMTLQLIPTDEMVFYDATQFTINNTGAVPLEVINTLSLDRRVFVDDTATKGWQVTAYVWLFLFGVGFPLGVIACYVRMTTNYGLQYAKDNLGFLTSNFRTKRWYWEEAIMLRKFVLAVGVIGLRNYPLAQMQAIIAGLMMYVVGLEWQVPFASTWLHHAERVSCYSALIVANVLMAKGSLKNSEADQASAYQGEAYTSFVAVMQVVSFLGVCLLLYIEWRRSAALGFSLEDSEGGEEGSQRSVFPINLDLLNFDGSYFKGFSMSRVSQYLSGPTPAASKPQQQQTSEMTPRSADFASPESVKDLL

SEQ ID NO: 2683 - protein, 752 aa, Bodo saltans
MPSESETKKALVHVSVATARLTFLLIHFSLVSHFVTPTATAAEACACVHRSDVLLDLYHSTNGPLWTTKWNINATEFPCAQPGVTCNDTISDITDLVLVDFGLNGSLPVSLGNLTALYRFDVSTNFVHGSLPESLSNWQSIAHFNATLNQISGSLPPSYSAWTRMVLFLVSTNSLTGTLPPDYGKMGTDHHSLCCERQPNHFRFVVFENNLTGTLPEQYTSWLNSIQNFNIRNNRFTGTLPVVYKVWNTLFALHVASNTFHGSLPSEYDRWTSIVEFSVAENNLSGTFPPSYGNFFLLKQFYMNDNSFTGELPLSYSAWSRIDAVFLFNNKLDGTFPPEYSQWRSAIKTLDASQNNFVGTLPKSYGNWTSMVSFTVALNSLSGSLPAEYGAWTSLQIFKVYSNQLSGTLPCGYAAWKKSALEINFSNNKFSGAIPSSYSQFLSLSTFAASLNSLSGVIPPALVAVPTMQYFSVGDNQLAGLLPATVSPLVKFFDVQNNSRLRGSLPQTMGVSMVMTCNTQITCSTTVFKYCFPHEFMIAFWEIPRAEILIASAPHLVAACSATPAPPPPTPGPPVQLTPSMEAPFRGDSAHFDTFQTATAALTYGVLVSTVGRGALPSIQRSTSALRLARRCAADVNAAGGDAESEDLSPPRFDSPADNPLLLSLPAGVGKGSASLDYATGAVVGNTIVVIVSAIILQCILVAQLCFSGETNQSPFKRFLVLLLGCLPSARFLGAISVLYAALLQPTVGACI

SEQ ID NO: 2684 - protein, 229 aa, Hammondia hammondi
MVPSASHPPGACPPGCTKHPATATAISPSGVCPMRAFHPAGAHSHFSCYDDLRNRLSHDKNVRPVASQQLDYLDEVSPFALAYYPPPLWGGFGLNPIDDMLFETALTANEMMEDITWRPRVDVEFDSKKKEMIILADLPGLQKDDVTIEVDNGAIVIKGEKTSKESEKVDDGKTKNILTERVSGYFARRFQLPSNYKPDGISAAMDNGVLRVTIKVEDSGSAKQQISVK

SEQ ID NO: 2685 - protein, 1073 aa, Bodo saltans
MMQSRNRIPHHHFIILQTLLFACILHAANTTTSMCGCMSQANVLMDFYNSSNGAGWTHKDGWGSTTDCSIPWYGVTCSSGSITFIDLSFNNVTGTLPSSWSSFVNITDLRLNSNPLLSGSLPPEWSGMSQLTTLWIYGTNISGTLPLAWSTMTSMQDLRLNSNPMLSGSLPSEWASMSKLTTLWIYGTNISGTLPPAWSTMTSMLDLRLNSNPMLSGSLPPEWSGMSQLTTLWIYETNISGTLPLAWSTMTSMQDLRLNSNPMLSGSLPSEWASMSKLTTLWIYGTNISGTLPPAWSTMTIIQNLQLYDNPLLSGSLPPEWSGMSQVTTLWIYGTNISGTLPPAWSTMTSMLDLRLNSNPMLSGSLPPEWSGMSQLTTLWIYGTNISGTLPLAWSTMTSMQDLRLNSNPMLSGSLPSEWASMSKLTTLWIYGTNISGTLPPAWSTMTIIQNLQLYDNPLLSGSLPPEWSGMSQVTTLWIYGTNISGTLPLAWSTMTSMLDLRLNSNPMLSGSLPPEWSGMSQLTTLWIYGTNISGTLPLAWSTMTSMQDLRLNSNPMLSGSLPSEWASMSKLTTLWIYGTNISGTLPPAWSTMTIIQNLQLYDNPLLSGSLPPEWSGMSQVTTLWIYGTNISGTLPPAWSTMTSMLDLRLNSNPMLSGSLPPEWASMSKLTTLWIYGTNISGTLPSAWSTMTSMQDLRLNSNPMLSGSLPSEWASMSKLTTLYIYGTNISGTLPSAWSTMTSMQDLQLHGNVLVGSLPDDWSQMVSLVTLRIDSNNLNSNLPNSWASFQNLKTVQLDSNSITGILPPGWSTMISLQILILNANNIDGVLPSSWANMTSLTQLQMSDNRLVGSVPPLWVRLPLLQQLLLQNNCLTGTMPAFINSALYVPNAINVCYTKIVESGPGVSRCPGYQWPEYCYGVASHTISDSPLGQSSTKSGVPSSITNSSTLSSLTISRTATAPSPSQWVCNVSSDSVFVQLTPPSVAMFDDGVIVAFVVSADVRNIVHSAGELSFVRLTTNSIPRVTLATIGLSIAMNVSIITPGDTAARWVVGGVSMAGVVALNWTAQSSNSVP

SEQ ID NO: 2686 - protein, 1069 aa, Bodo saltans
VTCVNGDVTALNVSARGLRGVLPPEIGNLTALQSFDASNNALSGELPSEIARWTQIVRVDLSMNRLNGTLPAALGSAWSLLTEFLVSQNLFSGTLPVQFKEMRSLIAFFVYENELSGVLPKEFSQWTQLQKFHVHNNHFVGTFPEEYGASWQALTTLHTATNNFSGTLPSSYGQWVNLTTFYVHVNLLNGTLPAEYSNWKHIQQFYVSINNLNGVLPTAYAAWKEIQFCIVYSNNFSGTLPPEYSAWASSLTDFSVSENGLMGSLPPEYSQWTSMSSFQSSSNRLNGSLPSDYSAWTNLREFAVFNNKLTGTLPSSYSAWTVIDNVQVYNNSLTGTLPQQLSAWTKVQYVSLNDNLLSGSLPPEYSAWSLIFWFNAGNNKLNGTLPPSYSAWSSMVDFYVFNNQLTGSLPAQYWMWSKLQEFSTTQNSLSGTLPSEYSSWVNLSLFAVDNNALGGGLPNRLSQWTQLQRFLVHNNHLVGTLPAEYGVSWRELTLFNAATNNFSGTLPSSFGQWVNIVNFYVHVNLLSGTLPAEYSNWKQIQQFYVSINNLNGILPSEYSAWTNLREFVVSNNDINGTLPSSYSAWTVIENVPVFNNNLTGTLPPQLSAWTKVQYVSLNDNLLSGSLPPEYSAWSLIFWFNAGNNELNGTLPPSYSAWSNMVDFYVFNNQLTGSLPAQYQLWSKLQEFSTAQNSISGTLPREYSKWGATQKFFVDNNKFSGTLPADFSAWGNLQLLNAAVNRLEGSLPLDYGAWGFVNTFDTSANRITGSLPSNYSNWLRLQFFNASANSLAGTLPPEYSSWKQLVTFAVFENNLTGSLPAQYNSWLKLKTFSVFANTLNGSLPPQYGSWILLTSFKAYVNSLSGTLPPAYSSWIVNNEFTVAGNRFTGTLPPEYANWGSSMLWFNVALNNLTGTLPSEYTRLTKLQYLYVSHNRLTGTIPAALLSSTTAQAMLLSFNDFSGAVPSACSATLLMLDLQNNSQLSGVVPPQQLFGFVTVCGTQIMCPTGRPYVQAACLPDDFTYFTTTSTADATTISPYTGACTNTPAPSRPRPTPTQSKALPASPRSEGV

SEQ ID NO: 2687 - protein, 320 aa, Bodo saltans
MELYNATDGSHWLNCSGWEASPTSCTISWYGVQCASNNDVVSVVLGANNLVDTLPSSWWNMTALVTLDLSNNTLQGSLPATWRTLTSLQYLSLYSNTISGTLPSSWGAMTGMRRLVLYSNELSGSLPDAWSSMSNLDTLYLAVNKLNGTLPSSWSSMSSMLDLEIHANSFVGSLPPSWSSMSSITVIIMCINSLSGRLPTEWASMSNMVFFKMHTNEFTGTVPGEWSSMTNLQYLDFSSNMLNGTLSSSWSSMSKLTVLYLQGNSLNGTLPSSWSNMSSMMDLDLNQNSLVGTLQSPSCCPLSAWSPCCDAILLHFVQRT

SEQ ID NO: 2688 - protein, 254 aa, Bodo saltans
MISTMFTKSLLTATVVATLVLQLFLTLPANAQCPCEEALPALQSLYNATDGPHWINPWQNLFSGASVCDLSGINCTSNGNIWIELRNRNLVGTIPDDFAVRYPRVSMFAVAFNNLRGTLPSTLALFGEHIGVFDVSRNGLGGTLPAEFSNWTSVGNFWVQNCSFKGTLPLEYASWGNSLKTFYFYSNALSGTIPPEYSAWSSIVVFSGSNNNINGTIPRVVISAWKDTIYDFSMSQNGFLTGDLFGSDGNGFCE

SEQ ID NO: 2689 - protein, 199 aa, Bodo saltans
MITDVRLQHNNLTGTLSPYFANWTAIITFQVSNNRLNGTLPTEYASFGNAQTFTVQDNDFTGTLPSSYGNMTSIQTFLCNINRFTGTLPHEYSGMVQMGTFDVNDNSLTGTLPVQYSSWTVVTSFTVGVNQLTGTLPRDARWSNLKVNFNVDHNQLSGTLPPEYGYSQWSLFRFFGQNNLLTGTLPCRTPILRLWLRLT

SEQ ID NO: 2690 - protein, 1069 aa, Bodo saltans
MQAVGPQDNATVVGKQTNNIQTGGGNPLTSTSHNNHQQQKTDVSTNGTHLPTDDSEEGCGQTVTNTVSGKTTNGIAGLAGGQPINNGSFADSQKDENRRVVTTTGSTYSARPEDHRAEQMRNAGSFAGGPENSNNNNNPAHGIIVQVEIPTDAQHSHEGDHDEDFGGSDEDDLLEDSALRPGKDYVATMSEFAVGESVGDKYEVMEVLKCGTVGRTYRARSTAHDAQCVFKVVCFLSREELVESVRDAQKVLTRLQHANVLPVFDVMEDANHENMIIVTSYVPNRNVSRHCGLLLPGAGGGGTHEIEHLRMMLRDIGVGIRVLHSHHVYHHNIKLENILETKDGGCCVADAGYSSLFSSQPLEVLLDLQNGGLIPPEYFLEDYDLTQASAAARIDTWSFGWVMYELAYGAPPYEITNDMSVEDVRRLVISHKLKCPIETTNAPNDLWEVIKWSLEKKPKDRPTVMKLLRHQFFRIANGQSFVEPGNSSSFAAGSMMHVHKSLTVEHTGFVMSVVLGKGPHAENFLVHMPNMPNKVFVLKCFSDSLASRMQHLETPQIFSLRKHLAITRKIRHPTIAHTYEIVDNEENTYATQRYFARGNLAINFPALEQGGLVIRMIADPAARAAGGGARSSFRGKHNNRRDMLDSALKSGGDGPALSRAGSMSIGQLSNTANGHRGARHNPSCDDPMDDDDDVVERGGDDSVAGAAPAPKKGLLQEHEANEDTNPLTEIELCRQNNESELMLHNFGLVMSLRRCLTPRIHLNLSNNSLVELPHDVSFLHNLQRLSLANNKLESLPDSVGDLGELQYLDVSHNALEDLPQSLMFADKLETIAMDYNNCSEIPGVILDMPQMRIIYLAENRKINKWPPVSQLVAIGPMKLGLDNEPLLWKEFHEIQHQLQSRVTVMWNKIYPDEIIPHLFCGSLRSAQSLAVYDRLNITFLLTVGRGLEPTVIPDMHHKVVIVDDIEGATIDHSFQDAVSFIDDALKSQQGCLVHCFAGMSRSATTVIAYLMIRKGMRLDEAYCTTRRGRPAIYPNGGFFAQLLALDAKLYPGGRPLDMPSMERHIIPST

SEQ ID NO: 2691 - protein, 297 aa, Bodo saltans
  misc_feature (297)..(297): Xaa can be any naturally occurring amino acid
MKQGAVKSVSTVSVILIVFAFTETAVNSASCGCAFRYDALMTFYNQSGGKKWTDATNWGLTTKCPNSWFGIKCSNGDVINIDLSSNNLKGTLWEGFSLFGNVTALSLASNKLAGSLPSSWYSMAALETLDLSSNSLSGELPPGWSSMTNLSRMYLKRNSINGSIPDDWSALKSLTDVVLSRNSLSGNLPLRWGNMINLNSIDLRDNSIEGSLPLEWSNMARLNSLDLSGNSIGGSLPGDWSTLESLTNLALYGNALSGSLPPAWGNMKNLSSIDLSDNSIEGSLPLEWSNMARLNSX

SEQ ID NO: 2692 - protein, 2509 aa, Hammondia hammondi
MNFVDNLKRAGAPVDGASLAGGMLSIFTKTALDMKTAKRVTAALAIAAETAEGSTALYNAGGTSVLLTYCLDQGDLSDAGVEMVEGAFDTVRYMAGYQCTDATTLPQCIALMDKYRGRKSASAKGSSALAAMIGPEQLQKCLNTLKTAEAGSAEYDEALMTLGSMSYISSFTDEIVRAGGVPLLIELINSGLPQMEGNPEKIASMISGAAKMLARIASNPVNVDAIVQAGGVATLCTAVSYCTESMEALGALCMALVPLASRESLAHEIVQYQTFATVLPILYQNVESPEIAALAMELVAAGSQHEEIQEHMLQNQAAEICSLCCQYHTADASYQQHAISALNRLVPRLTTLHGVSEYGGIQGVIASLNANVNNEQVALLAVQLLDNFSEVSDAKTYMSDGTCVDAVLAAMLEHEGNDLLISAGVHCLARIATEEDCSRHLNVLDTAIQTARGNPDGVYRVLAAISGLSRVPSLRQIFEEKSASDTILAGISSWIECTRFEGQNRIIKAALKTVKNMKISGDGDLTSCFAAMCDVACLPQVKRVVELEEPDNNILVADTAAFRDLAATMRITGAENLERCIESVLRVMRKYPDSRRAQLNCLETLNYLAQCDGGEGVAILSRTGGLNAVVQYLTRAPMYLDAQIAGFTVLATSAKIDSNVGETLRKCNCLQALKVAMRTHAKSKELKRTIAPLVALLMPTDALETEIQELLNECASACEKNNFPHLHENLAALNELLISSEGAKIAARLGIGAHMCRFQEYISSHEQDALAATDYDILGKDLFDATVSECAHAMEQVATTRSGRTALIKAGNVATLISLYESLKAPQSQYSEEAAIHCLEALRILLKSDKRSAELAFERNFVSTLCVGIDSFPHSAPVLGATCACLAAMATTPERVQMLTAQPAFESLLQKLVFVIQNDPSKENKLVAMRALQELVEITNDATMANKIAEAGAVTALFRIIDEYGDDEQLTVQAAEVLALLGAFEDLRRFYDSDVRFPAQVLTAALAKQKNNETAVVHLLDVLNKLATSEDRAVLRELGVMEQVADAMRVHSESEAVTRLGGELFAKMGADEQIKSLMLQIIETVESGAEDTPQTVDILCGRLAVFLAAPLEDPRDALQHTEKCLGSLVATLQAYPGSERLEGNVALVCRRLCDRCFDDADDPYGAWAVAASGMLAQFAGMVAAETVLANKKFLGPAYRTFTACCANAYCMPTMLEVAPSFLPQTYTLLEMHKNDAETVARVLEFLRYFAEDPTACGLIVQNMSGSSGDVVALTVLLMQQHQNNDAVVCAGMEFLGALAYTLSQAGYEPLPTLADGSVLRDCDALMGSNSSSARQLAHMHMIEKMLLSKAYNDALIQEQALKKLTMSLKAEDDKKRFSDEERAGLYAAMACVLLAAGGAGLTGEMEKFNGFEVVLQAIEEFGENPTVIKEVNRALQGLSMADVNMTARTVKEAVPKLCTEATTVIQTDAECADTFCDLMLQLVSQEGNGRQLLQVYGLEETLQGVENLAAYYGEDFGTQLAEKVAMIRQAMEDDQPREKTCKDVYDLLNSRVQQGLSVAISEVAILQEEVEFLVSQMGMYNQEQLDHQTAMGADHQYGNMAFELLASTSANIKLLQANEFSKMELALIKGQSDPEIVLYAVKALTAFCKFPPAAQDTARIQGCPALVTEACSKINKSGLPNERKEEHLCARYFLVERTAINRNLYNKTPIMTELINSWNDYDKGAYTTTLLRFVFRAMRRVVSDAHVEELLKANVLQRLIGIISDVNADMALLPDVLFLLGSLAVVPEIKTKIGELNGIAACTDLLNRALPKPNTAPVVTNVCLAFANICIGHKKNTEIFSKLGGPALNVKVLNDRGHEYDVCNAASVLLCNLLYKNESMKKLLGTNGAPAALVKGLSNYDGSEEKTAIRCLESVFKAISNLSLYTPNIQPFLDAGIENAYSTWLSNLSETFPDAQLETGCRTLVNLVMENEENNMRKFGVCLLPCMAVAKQGRTDTKALLLLLDIEASLCRLKENAEVFAANGGIETTIRLIHQFDYDVGLLTLGIHLLGIQSAVKDSIQRMMDADVFSILVGCVEVDAEGNEVTDLVVGGLRCTRRIVRSEELAFEYCNAGGIATIANVICKSINQPMVMLEACRVLLGLLFYTTRSQADRQAAVEALHAECQQRAEQMHAQAQADYEAGVVSEPPPEEMEVPEPDPDELANAAYGGWYQMGMDEVMIDAILQAVCACAAVEAHAKQLRLQRVCLGLAAYFASEQMGTSSLVGSGIEQVLTQIMTNFAGEGTTMQLSCVIINSIAMTSGDMYEEIKTSSLLGALKTSVGKMATKKPEEKALKETCAATLEAASSGEDPFDAFSKTVTELDFKFTEWNVDPYPNGVHDLPSNVKEALRKGGKLKVFLPEKEKEEIRWRSSQDLNVFEWCMGNDQDYNNRIPIVRIRNVAKGLVHPALKAAAKKEPRKVAAKFTMCLFGPPNDDFPEGVELPMVAKSQKERDAFVEMMVQWRDAATYNF

SEQ ID NO: 2693 - protein, 60 aa, Bodo saltans
MWMLLLSSGALCVVDASCACAYRLPVLLELYDATNGAEWVRPWNMTDVNALCSFRWCRMR

SEQ ID NO: 2694 - protein, 1025 aa, Bodo saltans
MSSRLVAFFLLVGVCSMLLSGSTAITTVELGILNEFISAVKYRGNSTPLELKDKCTTWPEHITCRKDDKTIATLNFTACNLTGTLPASLANLSDIVSFDLRLNRLSSTIPSVYSVWGSTLRMFSVASNRLTGTLPSTFSNWTSVTSVYFNENELCGSIPASYSRMTSLMSFYANGNKLNGTLPPEFGSWKLMTSFLVANNDLSGSLPTAYSDWSVLQQFLADTNTFTGTLPAEYASWQSVAWFHVQDNALTGTLPAEYGVHFSSLRSFIASNNRLTGNLPATYENMKLLSKLQFDNNSLVGTLPESLSELTRMRYFDASSNSLSGTLPSSYSQWGTNLETFSADGNAFTGSLPQSWSNWTNVQEFETHSNFLSGTLPPQYSSWTNLSRFSAYNNSLTGALPTQYASWGAVPKIIYLHSNSLSGSIPLQWGQLTGLQKVVLSSNQLSGSIPPLPRLQLLSVSFNNFSGSLPSVASWATLQLLDTQNNTLLWGDFSGFYPGQMGVATICNTNIRKSASVSSLTIPCFPNATFMSTIGDKSVSELLLLATEFSKNANSNPSTTLPTSNPTILPITARPTDANDVAKAPTRSSLSSASISTATALTSFLTGVDAADTQMLTTILGSPCTCSSQTAATAAEGSILLLALSPFSPLGSSWAAIGNSLLCCALVSAHIVLVCILDRRMHHEKSSQVSSAKVGVGGGLRLRFPNLSVSVILLLIPGVVRAVTSVLDGFPAAGDSTGLSVAAVVIGLVFVLCSATAVEMLVYHHVNASMITEGVKNAAQQQQSMRIQYTTHRRIERIFAPIPPYVSRVVLPQGRWEPEVSRKSFGGIVARVNGRRRRSWCALAMINIGVQILNGVGGGDAACDALQSLTMIVLVCAAAFFAVVKPHRALLASYLTCVSLLLSCLVTLLAMLCRLGSVDRSAVDGFGVFVSVAMMVMKVYHIALPWVEAWLMARNGAESREVLTIFQRDVTAPSSHFSLKSRRKNERHQSTDDVHAIGAAGSETTMSQFESLRRLVTMVCERSIL

SEQ ID NO: 2695 - protein, 276 aa, Bodo saltans
MLSGTLPSEWSSMTHMSTLALHSNSKPSGTLPPEWSTMSHLVALYIAGTNISGALPSSWNNMTSMLDLVLHSNPMLSGTLPPEWSSMTNVWRLHIFETNISGTLPSSWGNMTNMLYLQLHTNPMLSGTLPQEWSSMSQMIILYIFGANISGTLPSSWSSMIMMSNFQLCPNPMLSGTLPREWSRMSRLRALTICGTSIVGSLQPEWSSMSMLMTLNIFGTNISGTLPSTWSSMTSMTALRLFSNPCLSGSLPPEWSSMSQLRVLYIYATNVSGTIC

SEQ ID NO: 2696 - protein, 1086 aa, Bodo saltans
MHQHQSRDDVSPPSSIPQSAPSQHFDPLKRISSMFIIMSFLLVIIICSSFFVNADDAAADCLCDTPQNRGVLLAFQRITGNAWTFDTSVPLCSWGNTAVTCNDTIVTAVDLRGGGLFGNFSAILPSVNSTTFSFSGLSSLRTLDLTKNPLLYASIQQFEFPPSLRVLRLPSGFTGKCPEQLLNLTTFSCPQCGLQGPLPTSWCSNNNTTSGNTTTMQLLEVIELTGNAGLVGPLPSSWAACPLTLVDVSGTRGAGAIPSSWRDEQQLMAKTIARLRLGSSGLLGDLPGAWFTSVSFPKLVELSAPDNLLNGTLPINISQAVLMSLDLSFNQLSGQIPQTLAASLSTLKLSRNAFDGALPAVLPSAMTVIDVSDNTGLTGPIPVDWSEGASAPALQQILLGGCNLNGSVPQGWLYTSAVEESLVTLNLSHNQFQGGLLMTFGLSSTVVPKFLSSFDVSWNKLSGSLPTFVNSIAIVDVSHNQLQGSVPLTLPTSYFDASDNLLTGSLIAWGTQIGMLDLSFNQLSGALPSGGAMIFTASLLNLSHNLFSGVLPDSIGDTATTVDVSWNRLVLPLPSVGTAGLMSSLSLAHNALVGGLAPRGVLVQQATLFSLDLSDNAITSIVTSPNNATAQLVTLPPNLQRLTLRNCSVQRIPDILPDTLQQLDLSANIELGGSSGGQQLSGLWRWSFALRSVILSDIPLLVLRKVPIALCARLYGAELITLGGGFQVRFPKIQINLLGTLVEFRNRTGVALLVSNYDAQDAWVASWCRSETNSVAISASHAAPSPSMTPTKSPTFWRNDDPHRTTSSSKSITYPSLALSVDSTKTLTLPSTKTSTISRTCVITPSATSASILAESASSSWSSSRMTVTRSASSASQSTSLNSAATNSHALDLTSTGMLSTTPTLPLPNFVSVQVSAVVASAVSTGAATIAAIIGASQATSAFVAIGQGSFGARSLRDKCQSIAAAAQQQQRNSVNATALSIADEPFSDITDNPTTLSIPVGVHRGLQNAAGALIGNVALVVALSVVVTIVRLIKKKCVDYSVVPHRQWGRGPKSNTQDDTTEVGTKHHHVPSLAMLPWWWRCPWW

SEQ ID NO: 2697 - protein, 92 aa, Bodo saltans
MNGLQWKSKWNFSDPDAPCVFPGVTCDLTDITIITDVTKINLGQQGLSGQLRAGICSLTKITLFNVSFNGIAGTLPREYAAWASINELFVDS

SEQ ID NO: 2698 - protein, 1421 aa, Bodo saltans
MGVCISSPSNNNRTAAGSDKKKSINDPNNGMQAVGPQDNATVAAGKQNNNGGNPLTSTSHNNNQQQQPKTDVSTNGTHLPTDDSEEGCGQTVTNTVSAKTTNGVARQAGQPINNGSFADSQKDNNSTGNRVVTTTGSTYSARPEDHRAEQMRNAGSFAGGPDNSNNNNNNNPAHGIIVEVEIPTDAQHSHDGEHDEDFGGSDEDDLLEDSALRPGRDYVATMSEFAVGESVGDKYEVMEVLKCGTVGRTYRARSTAHDAQCVFKVVCFLSREELVESVRDAQKVLTRLQHANVLPVFDVMEDANHENMIIVTSYVPNRNVSRHCGLLLPGAGGGGTHEIEHLRMMLRDIGVGIRVLHSHHVYHHNIKLENILETKDGGCCVADAGYSSLFSSQPLEVLLDLQNGGLIPPEYFLEDYDLTQASAAARIDTWSFGWVMYELAYGAPPYEITNDMSVEDVRRLVISHKLKCPIETTNAPNDLWEVIKWSLEKKPKDRPTVMKLLRHQFFRIANGQSFVEPGNSSSFAAGSMMHVHKSLTVEHTGFVMSVVLGKGPHAENFLVHMPNMPNKVFVLKCFSDSLASRMQHLETPQIFSLRKHLAITRKIRHPTIAHTYEIVDNEENTYATQRYFARGNLAINFPALEQGGLVIRMIADVLRGLARLHDVAIYHLNLKPSNVFYTDDEFDHHFVLSDFWDQLYAAINPTSGGSGMGDVVDVERVLGRLVLRQQQNPQTFPKQYMEFVTMALTSCKTVRELMDHPFLASEITAADRSVTYFDVLDDDITKAIRDKFVCRNENRLADLLGHGGFLAPGVAIPFNVGGLARCVSAQSMTVGEGRRPSYNTTSPAHGNNNDDAMSVSLQERSIIPSEFMQKISYAFMDKMCCGLCKKELKYVVYRCAECSDYLRCGKCVSVDDHGHALNPMVIENVCHADADDEDMKVATLVAPAALNKHALEEIEMQAELPAGMLLAAARAAGGGARSSFRGKHNNRRDMVDTVLKSGGDGPALSRAGSMSIGQLSNTANGHRGARHNPSSDDPMDDDDDVERGGDTHSVAGVAAPAPKKGLLQEHEANEDTNPITEIELCRQNNEPELMLHNFGLVDVPPQMFDPPLSHIIHLNLSNNSLVELPHDVSFLHNLQRLSLANNKLESLPDSVGDLGELQYLDVSHNALEDLPQSLMFADKLETIAMDYNNCSEIPGVILDMPQMRIIYLAENRKINKWPPVSQLVAIGPMKLGLDNEPLLWKEFHEIQHQLQSRVTVMWNKIYPDEIIPHLFCGSLRSAQSLAVYDRLNITYLLTVGRGLEPTVIPDMHHKVVIVDDIEGATIDHSFQDAVSFIDDSLKSQQGCLVHCFAGMSRSATTVIAYLMIRKGMRLDEAYCTTRRGRPAIYPNGGFFAQLLALDAKLYPGGRPLDMPSMERHIIPST

SEQ ID NO: 2699 - protein, 1124 aa, Bodo saltans
MNVVVLAIDHNQCTGAHPDWSGTTSLSIINLQGNLFTGSFLPLPVVSSLTILRIDLGNRFTDSSLPNWATSPLLQEVSASGGNRFSGSIPPFHASASIQIFQVANNLLSGTIPSSSSLLGSRLQYFDVSSNRLTGSVPSLADCAASLVQFNISSNSLSGTLRLGVPLPSLQIFDVSSNQLSGSIPPWNTSAGLLRLKLSANTFTGSLPSMNLSNALIELNVSFNRFTDVMQLNNSLPALQIIDAACNSLSGSLPQWGASSGLAFVNMSCGNKFNGTVPALHANVYRSLRALDLSDQPVTGTLSTFLGTSFSSASLLPNVTMQNLSLGGAQLSGSLPLFLKWPLLLAINVSGNKLTGSITTSTTFPAGLVVVDLSNNALQGSVPAPTLAFTTMNVLLLGGDSHTFSAMPALSTKFPNLTRFSLSGSFSTVFPYAWFVGSLAWMNLTTVSLRKCGFTGTFPKPLASTQLTLIDFSRNQLSGTLPADLASYVPLLTTLTLGTNSFNGALPSTWSSLTNLVRLDVSSCGLSGTLPLSLSSLYRTLTAITLAGNSFVPSSTDNTLWATLTNLAQLDISNNNFSSLPSFGSSSTKLRLLNLSGNGIMSTLPASWSTSLSGLLSLNLSNSQFYGGIPVTWGGSSGLNALTDLDLSNNNIDNSTWSVSQLIAGSVFAALRTVRLQRNNFSGSLNANLTIGPNLQQIDVSSNQLTGRLPQFLLPKTSTLTSLQLQNNRFDGSLPKGWGIPGVAPSVQLLNLSSNLLTGPLPYNWGPLYSRSTFVTDLCGNQLCGPVPLVLQKYSSVGLSRCSLSLNVECYTYSDPITASATLSVEATGPTATITGSSDVTHSNTGPSPTVTRSPLISVSLRTFTAPVTASLTMSLRPTATRRTNSPSRSVGSATIDSSRSAGSVTPTFTMSTTPSASITESGTRSVTTLATPSLTSEATPSGATASPTPSLSRSLPTPTLSLTSEKTNSAMTPTVTILPEATPTLELPVTATRPSDTTSTSQTRPSNTSILSESVSLNTTRSRTMTDRTNSFIMSVTWSPSKWDCNALNKSEIYVGVGNATTAPINNNATRYVAVLSASPPVNPSVLAASNVPTTLVRNAIFTTSRPIDRHQLMDAPTVIVLN

SEQ ID NO: 2700 - protein, 6721 aa, Hammondia hammondi
MVTQFQPVRPPVRATVTAVSSPAFSPPSSIPSDGVPDRVSVPETSRPFDASVSHFAHAGRSQAAVDTHSGVVERHPNGERVAYRAEQSTFDYGSSSAYTPPPERRRQLRGRSRPASGESRGTILRNALPRANSCTPQVPSSLSVPHSAQQRPAASLVSWKAGGFSGNFSRRCVACSAGGQERVASDSRGDAAPHSAVLQRPASVSPQRTRAATGPKAVAFPLDAPDAGGPGACTPPTGARLEVSGHGKSRLSFQQDFTCGIERTLLPHLALPSVDVSSRGFQGRETTVWQDQVGGGRSEEPEEVDLNSGAGVTDRFYVSPQKWRCGQAAARTASAPRSVTTAGRGTSLASSVSECQSQLLPASPGASSVAVCTPEEDALRALQREQQQDLFAALLRSRQARLATTPGASGIWTEERNFQRGEWEGALRPSHPSSAAGSAVSTGERPEGGFPKMDAPLSAQTSGRAFFDVAAEQVVFYQRQAELFRSKYEDAERRCAERDAAVHERDVKIQFLQAQVAALTHQVQTLQHPERSKVTNRAEKEALSQLVAPPAEEAEEAVVVSKAFHEAQLARAREETKTLHQKIAALQQDVRRAVTSPSQPSTGPSPSPSHAGQLPSSETAVPRGDRETANEKWHADTCSEDERKKELTERLQAALAANEALREELLEARQQLSLLRASSGTSSAFPVSESPQAGALKASFSSSPALGGPFAAGEFSALGAPKQEVSFLPGVCRASDSSRRATSLSNLPSVEGCRSREKSPEDLLLSSSSGGFSRPHNLALRRELAVRRRLNAQRKQRCLELEQQVHVLASSLDVAREQARVAESVGLSLSQQLQAQTEEARCLQRRTVEAGKLLRAAQARLETGERFVALLREQREEYKALHEHHTECLEENRRLRASVERLETERMSLLERTEKNRVEFLALVAEKDRSDKQARDALQRLAEAESRQERSTQALKLHAQDLEERLVKKEEQLRSLRGELEAALLRAEAAEREFSRLRSGLSLASGPAEFAAGFPAFSSEEASTVAASEEQSKHAKEAQLQLVLLLAERAEESLRLSVQREKQLSREVTELERRLDRALQTMDEASEQAEALLADHVAAGAVYIQPAYTAGETLFWTSQQLLDVLQNRANWADLARGLEQRELELEARLLFAHQQNDGLHDEARRLETRLQKSEQRTLWIASQFLAMIDRGNSEAEDSRESEEEDAQFAQHTSSVHESEAWRQRSLLEDEKVEAERATLLQRLAEESSRASATEQANWHLESRVEELRAALAEITTERDSVAAELVEEKATVRDLAERLQVSEAALERLKKREREGVSRDFFCGSEADSHATGAAEGSGLSPTHLESLVQERDELQEMCRELAQRLDAMTSGMTRQQEERAADEERVERETRELHARWKRAASDCESLAQQKAELETQLQDLSENCAAAEVAYRDLEKKWREEREARNRVDEEDRRAGREVRLSRRERRLARRRRGGVSDEDAQPRDGASSLRSSLSSLSPFEEEGAELERRRPAAEEALERTTNLQKELEAANHQKHEAEEMCKELGTQLAVLTTLLEAATKEKEDLVAAATSGHAGPLSEQESPSQEKRDLSQDAKDPSQGKNDLSRDTEDSELLESREALLEKLHAREEELGEARRALLLEKETKAQLEEQLAVETRKREMQHQESEEAKEREEREREEKARRAADLAADLARANDELTSAREKLAASEAARAALEKAEVVREETRKGSLQRESETEEMRQMAAAEVADLRDNLASTREELATLRGRLQEWEATATTQTRLEEELEELRRVVDFQEVEKQQLLESLREWEEKEEEHQAAMKEFEGSYVALQREAFDARAQLQRMIRVVEEHKRRRLRALQEKKRGAGSASQQEEKSAGEGAPEETGSDLEEAGEASAEATPRGLETAVSEEELQAAEDHDILVGRVEELERMQTELEEQRRMLTKHLQQTTEKLQEQCQTTSELQTRCVQLADALEKARACGATEKDGETPAVCQRGEATLPDESAREETLRQRLASAEEELERLRREKDVLASYQETARGQEQAFEAELAKARREAEDNAEIHISEIQQFYEALQAKMEHAHAEAENALTTERQALRGEVQRLQALLAAQTEPTRDQRQDEFEREREKEVQREKEVQREKELERVLAELEREREEKARREAAHEREVAKTRQEAEAAAEMRVSEIQDFFQKLQDHMSQSHAQAKSELLARVAALEKELANLREQTPKEQREADNFQLEAKEVGSQEDEMEDAEFERMGVKQSGDKQTAYHEFERSVGEAEPASRAREESPEAEGRLERSAEAFEDAAASPRESPFYACSPSSSFSSVREFAEELAAEHEKAVAETLRREVEQLHAQCRTLRERVAALEKAAEDKGNLLAKTEDEKRDVEEQLRQTVARVKDQADRLARVSQQCSVRGQELQDLQRREVQLSRQVEEQEEKQREHNARMLQQNEERHEALLAKHAAEQRLTLHREQLAGEERRRQAAEAHAEELLERLETVQKKLLESENEKAQVSLSEARLREELDRMQMAHERERERERQAERAREEKQQRRVEGLQRAKRENDDRLAELLGRAEEQEDRLRTLERQEALLRREVAEQKTQLNVREKELEEQKASHEDAKKEFAAALARQEARHEQFLHARLEEERARAEEDVKMLRGLLNEQRDAQKQMETNFRRQLERQVQAARELDASLQECEDEEEKRVEKFNSTTRELQAVVERYNSTVEELTTVSEERDNLRLKLAELQSEVSEIRREARDLQAAHREKEERDRRQWEAAENLQSELEKEVRQLTEERAQALEREKREREELERLQREELDRMHREADAARAEEARERLREREEWEARWREKEEVAAEKASLLESCEKRLGQLQEETRRREEAAQRREEEREKAREKRLRDYEGEVHELHLKLHQRRIQEEEKLHEIREKQRDLEHELFSTQQKLQVAQRHREEAEAAAAAAERARTLCEGLLAEERGAAKKAREEQNALAEQVKRLNRENEEKSRQLQDQQLKFSHHLAVAAEESEAKEAEKQREAATVDALRDELQSMQEQLKKEKGEVSSLRRELVNAKAAHADAVERQGEAEKTRDETRQQVSSLQTTVEEVERRLQSVKTQLTEAREKLEGERERVRAAEDRQLQLESYVKELEAQERDAREASEAATRAKEQALQEERDRSDDDRMRLLAELRQCEEEKRRVEDELETRKAEQEAERERLEIELQRREEEIFGLQEECDRRREETVGEMAANREEQEALRGELKHFKDRVDHGEAKVATLTQHLEAAESEKRHVQRELESRVEELEQLRIAKSRVETDFSRLKMEVEAERERSQSQRSFWEKVVDESHKRQQELQELLDQRMAKSETAETAWRAKTESLQATVAALEEKLKEKEGHLSSLEKQLADTRESLSRSCSAVTAELHAKESRYEAQVAQLQEESRSIKRALESALADCRRQAEEHEQMLRETLGETQNQAQSLQRQLELSRAELTGRERAWQSAEQQSREETTFLRSRCGALEAELRAQETRAQGLEQENRQLHAREEATRQELEGVLQREAEMQRRFQQTWTEAHVSTEELLVQLQREEQKNRLELRLAEQRVQELQQIREREVTEWARERSRMQADSEKRQRDAADASKQLAEAQLATALVKEELCRVQDELAVLKVKDEALQRQFLSLAASSSGVLGSTGVSLSGGRQKGLNNLGHDEAHAERAEAASVASMRALTEQRCRALEAALKTASESRDRNAQHCASLRRELAELTREVEREKEEGEMKTGELEKAHRRIEKLLALQEETRAQAAELHRRCREYQVKVEDMLREREREEERRRDAPGEEERRTRGVARTSSTEGRRDAAEEAGGRGERSSRVPQTRFQDEGLAASGRAAHAEEADSLQASRASLLARQSLAFQKQTEMLQAVIEELGRKLENQQEQQRLLLTHGHRTAEAGREERERKEREQKERERDLQQRCQDGEIEREALKAELQRAELGSLEAQKQKEDVEREVRRLQILSENLQRRLNKVEAERDSQESAERRSEREQAQREQELLEALQERDIQQRVQESYLERIRGAVEELKAALKQTRREKDASEHRVLLLRRQLEETTALQRERDGAFALLQREVDEARECREKLEAEIENEKAKRQKVELQKDDLEKTFELDRAALDEECRALQSSLETLRGRLQVQEETKRLVEAEAQRWATQCRETQAALGEEREKGELQEKERGEERRKLLGQLEDERETRARLEQRCVDLEKERQREHEERAREMERQQEEIERVKASLAESRTAWEDRCRDLSDDLLQVRSQWRETQAHLEKALRGQEEEARQREEAERERDAETRRAAEAIAAVARLQGERRTEQATDAAENQHIETLSGKRGEEREARQEEQALKIRELALSRTRESEELERLKKTLQAVTDNRDLLQSEWLHLRQESEASRSDLTAARNRCLQLEEKVRSVTQELRDCQRALRVTDSEKTTQTEKLDRLHTSLERERRAREETLDRLVGLESELSRMQREKEESMHRLHTAERERESLALSLTALRERERQSRCASGDEAEIERAWQAEKAESLVYLETLEKQLKATEASLTRIREDRDRMQRALVDAEERLAEELERTRRREGGEEPGVSDSSPSEAVTALAAEVDHTHRMLEQARERTAALEKELVASYRQRETDSERVALLRAQLEAQRRSVEDADAAKEKLSRRLEECMRQEAFATAALEAERKLSGRLKEQCLQMETELAETGRRRLRAEADATQGETRLRDVESLLHRTREQLQARTEQEDRLREELERREEEVAALKATRDEQQLLVERLERQLQTEQELREREEGLKEREKKLRERESAEVSEKDKLVREIQNEAEKEKRELVKAVEERDDRVRRLEAEVQATRRDLEETRERAKRERSVEAEKLRKHLSSLKEVQEKSAQENDEKSRRLRQFERADATLRSELQEREERLVALERARAALEAKQAETEELVVSLRREVADSRKKLENERERSVAPRYEEALRTQIEETEKFQRENEALKESLETQRAQLHALEKRTRQRDQENESLETKVASLQKEVGRLNEAYASQVEKLRKDAERLYSELEQSETQRVSAQDASVELEAQLAAGATRWRASEARLEKAERALEDLRRRQQQGRSHMARAQAILEGLLTLPLFPPTTSPSSSSSALSTEGSKPREVVSPSASSREEALLTLAEKLREERRDAVAALREREAASRRSLASLGQELEEERWQVKQLQELLKEVDSARKEALEQETLQTREIDRLRSAVAKAAAASEERERTQLRLEEKLAEERKGRQALAEELQRQRNSSSAVSREGGREETHENCFHPTSASDREAARLRAEEGLVRDQTLREKEAECAELQRHLERLRGKVAELREGKCALERQVGRLDSKLHAAQEEKTQLTEALEAAAKEKRELERKAAGSATRASDLQTECLALQRQLEEVAERQALARSQSQGADEERQRLEETVAETVGRAKRAEEAVEKLAGEIQGLRRERQRLQEALGRKERTEKKLESAVQALEERLSRTHRKSESEGREGGESGSGEGSEAAARPTLEARLQRATEESERQARAQRALEEEIFESKKLHAEERERLVQENLELNERVAYLQSRCRHLEADLDALHRTAEVVQARLADRAEAETVGENKPEGRVDLLQELEAATRARERLEREERRLQAHLEDSQKALAVQKRRHEEQEEVVAGLKSRVEEVQETLRKREEELAVALARLTGKESELDCAENEVKDLQKTAESVQSRLSRLEETKRQLEEKNTLLQAQVERQQRVLSGLRGNVEVSVEHNGETAEAEHASTARQERRAREELDNDVRRLEEICEQLQREKSQQERVAEAKTRELDEFQRSFKLEVRALQEDAAKLQAMRAGLQSQREEALQTMREMEERVRELTRENHLLQRALERAEAECSQWKARVRESRSDVSEAQETGEGREGPELARRPRARARRDGQAADAPGEVQREEDTERTQALRQWVDRLEEKLQKAEREEQGLKRELHGATRRAEELQRALEQGVEKFDELVARNEELKRKWAEDRSSWAAQRKREVEEYKKEANQLREECMALEKENRVFQQELDRQAGDLKALHEKTLRLADRNAHLQAELAKQQDAASAVAPLEKEIIALQEEMEMREAAARGTEADLEAYRLKNRELEAEVASLWRQITEERGERELVESDNVMLASHQNRDQKLRYTEVLKKQLVSERSARLRLQRDANRLRVETFSLRPLLRLLAGETVGEIRVNDFGRGGGSEQKDSLQASRGVTGTSLAASILGASQNSAAAVLSASRRILRCSRPGLRHSRSVSVGRRGGAALPARSLSLSARSEKPTVALAVRDRVGDAFPVYRQLRVLHRSLSFVMNEFISFLALLQDVLKDEDLLDRLLGVLPVASTFMVSALPPSQQRQDLAPQLSRADAEDLPGLSLSQLDEGRPPETLEARRHHFFSLVSALKQQLRVKLLAQPAASVPSVSLSPSAHGLAASSSPSSPIPGGERGEGFQGEASRGQRQLSLFAAPTGLAGGSAHRGDLPLATLEEDVQGEASGTPSGSLSLGPLAGTSLVVSAGEQRDETTSVLSRLSRSRRAEGQGESRRGDAGGSRAGRGSALWRNEETSREWNPRSSFSLSPSASPGNSNRRLDGSLSEEERRTEDRSRGPDRPAFLQPKGSGAGAAGSGAQERKGEERRSLEESRNTIASSLFSSFASVSSFFESRTGDTRG

SEQ ID NO: 2701 - protein, 509 aa, Bodo saltans
MVNCSLYLNSLSGTLPSSWGANMTQMSRFYVYENSLIGSLPESYGMWSQLIEMDVSGNQLNGTLPSSWSSLTALRKLHVFHNRLSGTLPESWVNMSGLRELAVNSNALTGSLPSAWGGVGGVGGGGGGGATIFLNLTSFYGDVNQLTGSLPDSWSNSMRHLRVFSAAYNALSGALPASWSAMTELVTFSAFANSLSGQIPEAWSAMSTSLQEFLVNNNQLTGSLPESWSALSSLTQFLVQNNRLTGSIPPSWGNTMLRMRRFYAQQNSLSGELPSTFQSMVNLVEFAVNNNQLTGTLPDGYSTWTRLQTLFVASNLLSGSLPWSAMVSLLQVDFSNCQLLTGTLPVSWASWTNMSELYLGGNQITGSFPPQWSSMTNLTIFVANGNKLAGQLPDAWSKWKKMSQFFVHENSLTGTLPASWSAWGTNVLYLYVSQNSVAGSLPSSWSSMTQMIQFMASSMFLSGTLPSSWGAMTQLQYLYLHNNSLTGTLPASWQELSSAVLVLLQHNTF

SEQ ID NO: 2702 - protein, 574 aa, Bodo saltans
MHPLRHHAALLFLILIVVLLDVHIAAASMCECAHRFDLLMEFFHATNGTGWANQRGWGGSLSSSSCNLTAPGGGGGGGDWYGVNCSGGDVTAVILPSNNLAGTLPSSWLNMSNLTSLQLYSNSLRGTLPASWSKMTSIVLQLQSNVLVGKIPSSWVASTTTLQQLSLQGNCLTGRMPSVSSASLRVNNAINVCRTKIKGAAYYAATCPGSAWPQYCRLAASNSMSESGAGMTLSETSSVTVASRSAETRSNSCSTMSPSLSESSTSESFTKAQLSTCVPARGYLTLGKRSGEGESSPPTSLSAKQEDVCGMRSHIGDGVGLPWWYAWAGMEHAWAILLEYRTLLYGALDSSVLVVVSICSVVSGLDSSSSSAQCYGWSMVALVLLFAQGMVVTISHPFTTLLSHVNACVTILLTWLSLLAQLLFVWYSPSTRLVEAAAACSLAVVGVSALRMTVDVLQLIAAIRRRLSNLQLLLLTHTELGSDLKLVVLDAALIHDTCHDRNLPESNDPRDDDDEFMTDDDMSELNNKNTNHTTTTDVVVLSIQDANFWDSAGGAIGTSLVTEVSDILATGNNM

SEQ ID NO: 2703 - protein, 575 aa, Bodo saltans
DAQNNTLLSGKIPTSVGLLIVTVCETHLNFSTPSWSLFPMYTCLPDHFIDKVADISPTEWILQISNFTYTLPPPSSASPITTVAPPNAAINTTVMILSRTASASIASVSAVTTASALASTFADSDAADAQMLVSILGSPCVCSATSPTQQREGSVLLLALSPFSSLGSSWAAIGNSLLCCVLVGLHVLVIRTLSKERSAPHHHQRPPRSVQHADTVLSRWLHDNGSTIARLQLLARLRFPNASCTLMLLLVPGVVRAVVDSANALSDSDSSDAPASIAGICVGVVFVLWCTSWCVEWIAYRHVDGDVKCVRRARSLSTATCLRFELHKHPHKLFQPIPRSVAKILLPHGCWQPQPARLAYGSVVSSYVEKWRRAWVVVPVANIVVQILSGVDVSGSAPAACDALQGLTLCVLASVCAFIAYARPHRALLASYLVCASLVLTMVTALLGLLCRHGAVSPDAVSGFGVFASVAMFVFKLYHVLMPIVERRLMGRNGGVVEAVCSPVELEVVRKSEMEEVNSAVRRGKRPISVTSNQPREGEGSTRDVQGLQSDLQQAEALRQLIEAITDAKRCSSLL

SEQ ID NO: 2704 - protein, 851 aa, Bodo saltans
MRRERGAAVLLLCILLCRCCYLANGAALQLEVDIIAQFFKASGFRNTTAVTTENLCSGWPEMISCGSNRVASLNFKNTKLVGTLPTGFSRLIFLSSLIVSENQLTGSIPPDLGRCSNMMNVQMAKNLLSGSLPPELSNCSFMSSFNVSNNNISGTIPAAYSAWGTSIVTFEASANNLTGILPPEFASWKSLNLFAVADNQLFGTLPPEYSSMKAVTYFRVNKNFLAGSIPDAYHQLRGAITFSCSNNFMIGTLPSSLAAWTKMNNFQVDGNRFTGSLPLEYANWTEIVYFYVNNNFLSGTLPPQYGNGWNSIAVVSAHYNSITGSLPTEYSALTALTSFSVASNLITGTLPPQYAAWLQISQLNLNGNGLTGPIPTSWGTGMISLRTFSAFNNMLSGTIPLIRFPLLTAFAISFNDFSGSLPTSASWPTLTILDVQNNSKLVGPITLPAATLMISSCGTQLCISRPETLLAQACFPSGGIAATLNLDLAAFLAFASANLYSTVSCAVTTVAPPSMSPIHSPPINSSNPTDSPTKLVHLPSSVQSATASAVYATTVMGGAGSLGRGAVPALQRALASLRLAARCNAAMNIANNSAVDGGLMFSDLADNPLSVLLPVGAVDLSAAGGAAVMNAVLVVVIGAALHASALLQRRLRSHGRAEFNNKESSSVTSNVTSVVISLLPASRVPGSLAVPFGALMQPGVGACVALMMSSARTPSSVVCGVIMAMVWMLLPVYCMFAVIARGRRVYGDSRFALRNIAADGWIRSNQRKTSRRPSSVVARVLSAVQQAHRYSTHEASRWTLRTAVEIRAVGHHQLSVKQDQLSNRKYAAYLLENMEAVFGGYVGGREWYFAV

SEQ ID NO: 2705 - protein, 111 aa, Bodo saltans
MNTFNVSHNNFSGTVPTAFSAWGTSILLFDVSVNSLTGTLPRAFLNWTMLSNFIARYNQLSGTLPPDYSTMEAVSFFDVNTNVFTGTLPEVYQQLHKMDFFSCCNTLQRTS

SEQ ID NO: 2706 - protein, 553 aa, Hammondia hammondi
MATQTTTKGSSRVSRCTVALVFALSACASDALNIGNHAHHTRLASGKTSARGVANPWADILERYNVPLVHGSGVYVDLGNTKTLSNKKYREPGGKCPNYGKYIQTYQPTTNPDIWPNDFLRPVPYANTPQDTKPLGGGFAMPMKQISPVSLKELKEQVESLKAGNGVSSYAVEHAKKIRDDLGHCIFWARMTSAHDASSSATNSKEDYYRYAFAWDPKNEMCHIMYLNMQEMTGAGTHCKRGDSGPNLSWYCFQPQKSIEKNLVWGSAYARPDHASACPEHGLVNVHWGQWNGRTCQKMAVRKRISVGSATECALELFKNSPSDNPTQYVGDEGRGWDKILDDVVGVLIPAGSTKKDQPHTRGVGINWANFYRKSSGSYCEMYDGVPNCLTSAPDQYAFVSLGDPNPDNAQLPPCSSTTEGIVIPSQCSCPEGATSGTTTGVKCEDGKWVDGSVSCTCSLDEDTSVNIWLIAGPCIAAGVLLLGGLIYWMAQRNKREPAVEKPQIVDETREHAVRTRQNQADLLQEAEPSFWGEADNYGTSVILDSSTIDKDF

SEQ ID NO: 2707 - protein, 208 aa, Bodo saltans
MGSLPPEYHNWTLLNGIDVVNNQLTGIIPSVYETWTQLLYFDVGFNQLTASLPATLSSWTMVQSFYAQSNQLQGSLPPEYAAWTQMNSIAVYGNQFTGSLPPSYSSWSNMTTFYAYNNTLTGTLPPQYSTWQNIREFCVQANRLNGTLSNWTAGGIDMRSSSRTTVSLVHFHLRTLRGRRSISLMCPSITLTDHFPSEYSNWTRLIGL

SEQ ID NO: 2708 - protein, 267 aa, Hammondia hammondi
MGRTMNCVVVAVACVAATTGVRGADVPVEAMNTPTEFDESAPDRQIGKLSELPSFAELPQLAEIPKLSELPKIADMPKLSDMPKMAEMPKLSDMPKMAEMPKLSDMPKMAEMPKLSDIPKMAEMPKLSDMPRITDIPQFPEMPRMVDMPQFPEIPRMSDMPQFPEIPRIADMPMFPDIPNVTEMPKLADLPRLADMPSIADMPRLSDMPSIADMPKFSSNEFMAKLPYSGEMDTVLSGLREFFTPLSDLIKPEAAPLTSLVKPSGVF

SEQ ID NO: 2709 - protein, 146 aa, Bodo saltans
WGYVNNCTVSWFGVTCTSTSLPDSLCQIVTLQTLNLNLNKIQGTLPASWKTLVKLSSLNIMHNALNGTLADAWKTMFLITTLYLANNNLTGKLPASWGGPWRSINSIDVHSNSLSGTIPTSWVNMTTLTGLDIQSNCLYGCQSLHP

SEQ ID NO: 2710 - protein, 981 aa, Bodo saltans
MMILVSYLWMMWLLVLSSSSITQTAATLAVLIDLYNSTAGENWSDPWPVKENGNFCKWTGVSCSRDGKSITGLNLFQRGLQGTLPRPLGNLTEMKNFNVSSNNISGTLPVELSVWSSLKCIDVGNNSISGTLPPEYASWNESLEILVLRNNTLNGTLPDKYSALNRLRKVFLSFNQLTGTVPSTWMSGLSNVALFDVSSNQLSGSLPSTLPASLVAVLFDNNRFSWNLPTGWSQAKSLFLVGLQGNPFLVGPIPKDWASMFETLLGVSGGLMSLCGTAVCTPSLLPPMKLLYQAFICFPTANRDVVFNLAAIEDTEIVATFSGIIQAINQSAYLTTATICSTLSPPPPPASTRNPSTQSPPSSSAVALTWSLFDAAKKSTAVVTSASSGAGLFSGGAGGGDAGDAQMLAAVLSSSCVCGFNASSASSGGASVMSFATSPFSLLADPVYVAIGNPMIALALFLVQLLLVSRRLPPINHTTTATDFEHRELGESLHTQQQQRQSASFLQRIAKMLQLKLQFTCPEHHHTYPFDHSRQRQAPQDNCCSCASIRAQYRFPNLSIAIAMFLAPGVVGAVVRTCISTPASIASASPVGLRVFGILLGVCFLFGFFFVIEFVVFREMVEKGLVRVRRGNIRSTPERLHSSGRRNRMLKSESPSSLPSTPPSHAHSGGTITREPRLRFKLYKNPASSFAPIPRTVAEYCLPNGHWLPQSERLAIGGIVGSMDPAHSSFRAWLWLFAANCITQFVAALPFDAFAYPTSCDAAQIILVLVAFGCAALIALRRPFRFLLMSAVNSVTLVLVGCVSILQMACRHTPEHVSQTDLSGYTTFVSIVLLLSKMYLIGAPFLEGFLATKNNVASVVQDVSRTPPPPTHLRPKFQIHGSSQGLDMRSKTPHHQQQQQLPTSPQQSSSCGDTLINQSLVSSSSLTLLPGSIAMSLSPQHATGRSVRFKGSESQAMRVEWGSMTQVEALEKLIRIVCSYD

SEQ ID NO: 2711 - protein, 826 aa, Bodo saltans
MSRFRSLKPKSNRSAPAFRCCFLLFIILSAFFVLRRSWHRANILPSAVVDHHTSSHDTDRNTTEEENLTSISQPPRRMSFTKEDEEQVVLAFAERLRQPNSFFALTDHKEKQLSVFLDLRKLDPRHAALVLDHNAPISLTTTIVRAFETVQLHNETERQSLQPALRDIVEHVAHRELPSLAILSILRGIDMGSNALTGLTEDIAVLSDTLETLFLTDNLLQRVPAVLVGMTHLSRLSLKSNRLTSLHPQRDLPKSLMHLIATENAISDFQSGFYNHDVTTRSESQFGNLRKLMLAGNSLTNIDAVFGPPASLPPISIPTVFDSLELLRISRNHVRELSPPPSSNTSSSVLTLFRSLSWISFAGNPLTADVNIVAHATILPVDKRLSLMLHSMIDLTSRMECSSNHTDVIVLGQGASGVVKQCLLFPTKDERDANHQQPVAVKFFKRISSDGSGADEISALAHVPLHPNIVAPIGYVRFPSMAKVVESNILDAHISHQMHRFVDEGQDDGPVVAMCFPLIHNKKPLGKPPTIWTVSDDIYDQGGLLVESSPLPVPMSGDAATASVAVCLYASNALIASMKSVAEVYSALAALHASGVRLVHGDLYAHNMFFGTLQGGGRAPQHKALFTDAFRSVEDIRAKTSSNIPSNEFWAQHGILVTDFGASFHYTTDAFDERASRALIASELNAARVFVRDLYESIIPVSRLIHLLRDATSDHPTVAPTKRSPKPERGSLNYPARATDVVEQLRALERSVALTLSLHQSVSAVEQAARRLNLLVAASSELIHHVFFFDMDARDSLDGPTSVLDKTVAGVDRIVEETLRRFISQA

SEQ ID NO: 2712 - protein, 552 aa, Bodo saltans
MAKRILYASQLLSVTPPMFFIISVSLVEHAAIETLRSLHSMAHHCLLLVTMLIVSITLYTSHATTSMCGCMNQASALMDFYNSSNPEGWTHIDGWGSSNCNIPWYGVTCDGASITSVDLSSNNLTGTLPSSWSNMTSMSDMQLYTNPMLSGSLPPEWSSMSKLRQLYIFGTNLSGTLPSSWSNMTSMSTLLLYTNPMLSGSLPPEWSSMLQLLVVYICGTNVSGTLPSSWRSMTSMLDIRLFSNPMLSGSLPPEWSSMSQLLGLHIYAANVSGTLPSSWSNMTSMSNLRLFSNPMLSGSLPPEWSSMSRLATLTICGPGVFGSLPPEWFSMTMLVTLNITETNVSGTLPSSWSCMTSMENLRLYSNPMLGGTLPPEWSSMTSLQLLILSSNGFSGTLPQSWANMTQLTQLQISSNRLVGSVPASWLSIPLLQQLNLQNNCLSGTMPATTSPLLLLPNAINVCCTKVRGGGPNVSSCSGYQWPEYCDDVVSHTKSGSTGASATESHLLLSTTTSTSLSNTSSSQPPMTMSSTVTATAPSPSQWVCNVSGGTTS

SEQ ID NO: 2713 - protein, 607 aa, Bodo saltans
MASHRLLIIVMLLFSAVCYVADAACSCAHRLPVLQDFYDATNGAEWVRPWDMTAVDAPCGFEGVTCGAPNDITIVQLTNRGLRGTLPSSLSQLSGMKKFQADSNSLYGGLPREFSSWTLIEHINLSRNSLSGTLPPEYSDLSHLTHFIIFSNMLSGSLPVQYSRCTNLLLFDVHNNQLNGTLPPEYMSWTNLDSLSLPGNSFIGSLPSSYSAWIHLNWFDVASNQLDGTLPQEYNAWSTLGAVFSVGSNRLYGSLPAEYGSWTAITSFATAGNAFTGSLPSSYSAWLLTHFDVSTNKFAGTLPAQYSSWTTITFFSAAVNAFTGSLPSSYSAWMPASFDVSANKLDGTLPAQFNSWSAVTMFATGGNGLTGSLPTSYSAWSNLQTFYVSNNKLDGTLPPEYSAWTKLRSFAAVPYRLTGTLHASYSAWVLTNFEVSANKLDGMLPAEYGSWTTITLFATGGNGFSGTVPSSYSAWRSLETFHVSNNRLDGTLSPEYRVWTMLRLFAAAGNSLTGTLPASFSAWVPTYFDVSGNSLTGTLPPDYSAWSQLTVFAVAGNAFTGSLPSSYNMWLLTHFDVSTNKFAGTLPAQYCSLRNNVMRNNIRYPCF

SEQ ID NO: 2714 - protein, 618 aa, Bodo saltans
MRTQFVVVLLFSLGALTSAASSIVWYGTPEAASYVGSCHELCCCPVCGVPTNDAFPYGLTVDSVTLPFPKVKGASCHFSIWSDRPYNDSNGNAVTVPNTLFWQNYNVFLDYVTHTAPITCDCCQFSGVDTSCQETIPIATYPKYFYVQGGLAQEYQPLTLFFMDGVQLNYTDVVELRNDTYCGYTHPRPVQSFGNLTITNQSFTSNVNIPRLPPRGCYKVCYYASSLTTPQWYDLGFLTVNAKPAASISFVWNNLDVLLAGNTATITYFGRRLLSVFDDIAEFRTSGTCGSGAPAATTSTGTNGILSVIDGTEWCKPAVVAAITSARPLNYIAIQYSDCGTSNRVYQARTQWTLTLPTSAADLTYTVCYRTASTWYNAGTVLIPGQRTAASALQTLYVATRGATWIRKSGWGGSNACTFYGVRCDVNGNVVALYLQRNNLTGTIPSALFYAPYFSTLNHIAFDMNSLSGTVPREMGSLRKLNFLDIGFNSLSGTLPSTLDRTNLYITYAGNNQVKGYLPTVIDSIGLSWTSYGNNLTDAPDPLQAPGCPTDVMECSEVGSTDYGTTQCGPDGMTEGACTAYGCCFNAQAPLTFGGTACFTKRRVTYLQYPPCQKLSCP

SEQ ID NO: 2715 - protein, 209 aa, Bodo saltans
MFAVSFNNLTGSLPLSYGGAWVQLGRFEANNNALRGTLPSVYSQWKQLTYFTVGHNQLSGILPSDFSAWTQITSFFANDNNLTGTLPSSDSLWEDLVLFCVGFNQLNGSLPSSYSAWTRLEGFAVAVNQLNGTLPKEYCLWTELTYFSAFGNFFIGTLPPEYSTWTQLALFEAHSNHLTGSLPPSYGGAWAGGLHKRVMYRKTSLAVRC

SEQ ID NO: 2716 - protein, 440 aa, Hammondia hammondi
MLCVEVLELLLYSCLHEYCCCGRGGSSSCVGRRSQGEDGGELVIYGAEEDGCPCKQIRNILVVSLCDGGIVAAAVSSSHTRPFAAKALAFPPSHFSPACMIASETEAAQQPADATVSPPRPMQSSTQSLQIPGEPEHPRRGPIESQHNGAQTIAALLASLYDEFFYALSEQPTLDRRFCCGDGMRCPIRCSQPRELKQGSAGPDGEATGQDDVKRNAARVEPYTVSDPASPGFLEPADELPVLVVSCDRDKAAVGPFFVREGELPPEEEAKRFAQLQRGKEARRRTDEHGQADRTCGGQSARTPAGEEGRGADFDAALSPGNSAGLSECEVRGICETQEGKGRECRQVEDTCFSTGASEASSGTTSEQSAPTSLNATQTAAGNRETSTRSCQGTELEQEVGVEVSLVLIVWGTEKAREGLLLQTYDRVRRLLSRKMVGLV

SEQ ID NO: 2717 - protein, 598 aa, Bodo saltans
MSCLMKEAYANRGTIWQDMLAWCLFVLLLVFLSLSECAAAAACACANRAPVIQAFYTATNGASWLRPWDMSSADVPCGLEGVTCDSAVGDITEVTVRDRSIRGTLPIELGQLTAMKSFSVANNSLSGTVPSELSFCIALDHFDIWNNSLSGTLPPEFRAWTKISLFSVGINQLTGTLPEAYSAWGASLVTFYADTNSLSGTLPAAYSSWTALEVFFAYSNSISGTLPPEYQSWLSMSDFRVDSNSLTGTLPAAYSVWTALTFFYLSSNSISGTLPPEYHSWASMANFRVYSNLLTGTLPSEYSSMTNLFYFDCSSNFLSGSIPQAYSSLVNLNRFYVRNNSLSGTLPSQLSAWTRIFTFSVNINNFSGSLPAQFGSWAAINTISCATNSIDGTIPASYGNMASLTTLDLSSNRLTGTIPLSLMMCSQLQILSLGNNELSGTVPADCSTNLGLLSLQGNAALSGSVPSRLVSLFAIVSVCGTEVCPTSTLPTQVCFPKGFAYDGVLTPVGALSLISQYKSQCSAQRVSAAQLLSATRTQWRDTGPSSLSAVASGLIATAVYSSIVSGALGRGAVASLQRSGTVLRLAALCDESSAASAS

SEQ ID NO: 2718 - protein, 206 aa, Bodo saltans
MMAILLLLCSASILKFPVIRSRYISLLLALLLTTTIVSASMCGCQQRYALLMDLYTATNGAGWLISSGWNTTNDCNVDWYGVTCSAIDVTSVFLTSNRLVGTLPSSWWNMTALTSLALCSNSLQGTLPADWGSMTKLVSLQLYANSLSGSFGGEWSSMTMLDTLLLYSNKLSGTLPSVWSAMVRLVNLQLYSNALSGTLPASWSSM

SEQ ID NO: 2719 - protein, 457 aa, Bodo saltans
TLPAVYGPSFKQIVNVLISSTRISGSIPNEWGSWAATVQSIQLYLNSLTGTLPPSFGNFSKLQSLNFAMNNLSGEVPVVAWSKLRGVQSITFQDNPHLYGSIPESWNSVFVAGSFVGLPSMVSVCRSHICAAKLSALPLGYGCIPVSAIPLLATVDASNMVGVLSQITWLRSVACNASVAPPAQHTVTESHTRLIPVHAIDRAAAKLSESQRVTVATAAAIGTTIMILQFLPSSVGGAGSMHALQATTVVQHLRQLCLSQDASGNSYDYSNDVGANADNAVCCDAGTSPTQLSVGSGVHEAPLAGAIIGNTILVAAISGARLLLQYFLVRKCHLQLVEERDTRCGTDAPPKAGDSHHVLVLDDCPALMSVLQTMAQLTHGGIVASLWVPFTALFTPTVAAGNVERKWRRGCSLGRFWCLGVGSALDCFREGRSVRKICTTHKSDVSPQSRSRREIEQ

SEQ ID NO: 2720 - protein, 1275 aa, Bodo saltans
MHPCLRALLLGAMVVIALVARTTLAVGMCGCEYRYNLLMDLYNATNGSQWMNNSGWGGGGDCSVRWYGVTCGPGSPADVTQVNLNNNNLRGTLPASWSYMSALTTVFLNGNGLKGPLPSSWGNMSSISSLGLYGTSLSGTLPEARRGVRMRSLTMLRLYANSLNGTVPLSWANMSNLQQLYLYQNSLTGTLPDEFRLLTSLRDLQMGVNSFIGTLPASWGELRNLGTLTLNTNALTGALPASWGNLSSISTLGLYINSLSGLLPASWGNMSNLRSLSLYGNSLTGSLPSSWRGMSSLQTLLLHVNSLTGALPEVWSSLGSLQNVQIGANSLNGTLPSWGNMTALRTLHLYTNSLIGTLPSSWGSMTNLQYLYLYNNRLTGTLPSSWNGMSSLLILLLNSNILTGTLPGAWNLMISLQNVQIGGNSLNGTLPPSWGNMSSLQVVSVDGNGLTGTLPSSWGGMSSLQNLYLHTNSLTGTLPSSWSGMGSLTYLAINNNALSGTLPSVWGGMSSLQFLLLYTNSLSGTLPDVWNTMRSLQHVQISVNSLTGTLPSSWGNMTALTLVRFYQNALTGTLPASWSGMSKLQELNLCINSLTGSLPATWGSMTILQIVSLYSNNLTGTLPSSWGSMSSLAILMLFTNSLTGTLPPSWGDMSSLQILYVYGNRLTGALPDAYSNLTRLTNLSLNTNSLSGTLPSSWGNLSSLMYLHLGVNRLVGTLPAAWSNLSSLAYLAMNSNSLTGTLPPSWEAMISLANLALNANTLTGTLPLSWEGMLILQSLNLNTNSLNGSLPTSWGNMSSLQTLSLFTNSLTGTLPSSWSGMTNLQSVYLFRNSLSGSLPPLWASMSSLQTLNLYINSFTGTLPSSWGGMSSLQNLYLHTNSLSGTLPSSWAGMSNLTYLAINNNALSGTLPSVWVGMSSLQTLLLYTNSLTGTLPDSWSSWRSLQNMQISGSSLTGTLPPSWGNMTALTTLQLNQNALSGTLPPSWSGMSNLQLLYLLINSLTGSLPSSWGNMSNMQSLSLHTNSFTGTLPLSWAKMNRLQYLYLYNNCLDGFVPPDFTSSPLATNGGLKTCGTKMKGGYNVPTCPIPNLWPSYCKYVASLTVTGSLAPSLTSSNTLVESATKSHSFTSATPSSWNCEGQPGDVVLVLLPPVTELPPVVGSSAIVAVVTADAPSSASARQQASTSAIGTRLTAITARSVAREVLLQSSFLAFNVTILSPPVSALRWVVGSVALSGSVVNFTAVSTNSVPWSVVVVEAPTAGGWVGSTPVLMATEL

SEQ ID NO: 2721 - protein, 1081 aa, Bodo saltans
  misc_feature (328)..(427): Xaa can be any naturally occurring amino acid
MFFLVGAFGFTCPQPSALANPDLDTAALQQYILASERYSSLPCISTPAPVSPTPLPSLQPARNNATTVVLPYTALAQSSATAAVWSVVAARGVPISGASPPAASVAFLQGAFASSRLRRRCTALTGGNSVQDASEPPPLSDPLDNPTQVELSSTAGRYAGGAVIGNSALLTGITLIGHGATLLKLWLRRRKAGPGRDAARCATTLLPCDGRFPASGFALFSLLIQPSVAACVVLFMNNSNDAEAIVIAVFGILVWGVPLAGVTWKLYRMQLPFTTIRKKTETNENTPTCKHQRHQLKPSSTRVGIDVAPGQPPPITVADIQPQPSSSXXXXXXXXXXXXXXXXXXXXXXXXXXXXXXXXXXXXXXXXXXXXXXXXXXXXXXXXXXXXXXXXXXXXXXXXXXXXXXXXXXXXXXXXXXXXXXXXXXXXLTGSLPSSLQTWTVVRNIEFATNRFEGTLPVVYSLMKKMEGFNAKNNKLIGTLPPQYGQWSSLLRFYVDGNQLSGTLPDAYDGWGPSVFDIRISQNNLSGTLPASWGVFTNVERLSLSFNQLTGTLPSSYSAMTSLVVLSLDLNQLQGPLPASWQSLTSLQAVGLQYNYNLQGPIPPSWSSMRRLLVMAVCNTSICGNASMFFLVGAFGFTCPQPSAIANLDTAALQQYILASQKYSSFPCISTPAPVSPTPLPPLQPARNNATTAVLPYTALAQSSATAAVWSVVAVRGVPLSGASPPAASVAFLQGAFASSRLRRRCTALTDGNSVQDASEPPPLSDPLDNPTQIELSSTAGRYAGGAVIGNSALLTGITLIGHGATLLKLWLRRCKADEGPRKAAVAAARCAMTLLPCDGRFPASGFILFSLLIQPSIAACVVLFMNNSNDAEAIVIAVFGIFMWVVPLAGITWKLYRMQLPFTTIRKKAEMIESAPTIFKRHHQSSKHSSTRVGIDVAPGQPPPITVADIQPQPSSSREGVEPNLLVHQENDTRVDEESEARHLSSRWEELRKFFWTPTHSWRTRHLDGSTKASLQVFYDAYGVFFAGVRAEWKMLFSVELGVALISGVVQGAAEAAGTKLGDGAHDAAACDAFLAHSTS

SEQ ID NO: 2722 - protein, 1983 aa, Bodo saltans
SQGAGTNLLSMTALLSFSSLSQATQSMGSTPQNASVTRKRPRKMHSAGIVSWDVSSSTCTWSGVGCSATVLRTLTLCSYGVSCAGGTLPATLSTWQAIGSALTSLVISGGGLITGSFPPVASTSLTVLTSLSFFSYSPTGNVQLPNSTVSFSLTLSSSSTITIAPTTSSRLTYLAVVASKVPDVSGILSLASVSIDSGTLNATSWTSMTGLTQISISATVGVLPSWTGANFPSLKTIALLSHSGITSLPASWSTLGSLTSLSISFCSGIKSPLPSNWSSLTNLRTLSIFSTPFTGPLPSSWNGLLSITTINIASANFAGATLPATWTSIPNLTSLKVADSNLCSPLPQWPNATLLTYLGLQGNSITSPLQTVINGWSTLKTLDLSNNPINGTLPPWPEMTSLVTFYGFSSRIVGPLPEWGSVSSPMMSVQVISISNNVIGSTIPASWARMPQLINLNALSAGLTGQIPFNWTSSVLISLALSSNSLSGDISTLTFASTCFSYFDVSSNRIGSNCTLIVPSSLRYLELSNNLCEGTHPNWASATNLTFVSLRNNSFNGTLARIPSTVLETLRIGGNLFTGTLPSLRTSSVLSEISASNNWFTGTLPPFNTAARPSTLNFSANNLSGTFPNSATVLSAMRYLDLSGNGFSGAAPRLSLASSLVQLNLRFNYFAGSLTLSPSLTSLTLLDVSCNSFTGSVPSWSTSIGLAYVNLTCGNFFTGTMPLLSQKADNTITILDLSDQGLTGQNLSAILPTQPLSSVTTFLLGGNALNGSLPAFWMWQKLEQFNVTGNNLTGTLPFTTIALPPNIWSIDISNNNALTGAILDPSSITKKVQHLLLGGDNHYFSGALPALSTKYPSLTRFSLSGSFPLVMPYSWLNGSVAWVNLTALSLRKCGFFGTFPEAFASGNITSLDLSWNRLSGTLPSDLAAYQPKLVSINLSENGFTGSLPTSWLNFSNLTVLDVHSCLLNGSIPPFLPVSLQVVLLNNNRFSGTLPSSWETMTNLQLISMNCNSLRGSLPESWGNLTRLRTLNLSNNNLSNKLPSSWESMTSLQVLSLNSNSLSGELPSSWANLTSLQTFELQLNNLNGSLPESWGNMIMLVTVYLNNNSLSSTLPLTWENMTTLQTLCLNANGLSGELPESWSTMTSFETLELKNNHFSGKLPSLWGNMTKLQALYLANNNLSNTLPQSWSSMTELLTLDLSSNSLTGAPPVAWGNLTRLRTLSLSNNDLSGTLPPLWESMTSLQAMYLSNNNLSGELPSSWENLKSIQFLNLSCNSLGGTLPALWGSMTSLQMLFLNRNSLRDALPVNWSNMSNLVTLSLSHNKLSSLLPPSWGSNMTSLRTLCLDHNSITGTLPVSWVTGVHDKPRKLYLSNNHLSGSLPTLGNVDVMTNSLVVVLDVHNNSITGDLPASWGRSMSGLQFLDLSANELKGTIPSEWGWLGYNQQESIPYVNLSFNVLLTGFVPLSFVQTNKICLCVFNTLVRSEFRFRNNWSCTWTIVPLSLTMSIQSASMSSVTLSDTDATDSHPSSVTRQSASDTTTKSVTMSPSAPIAPLDLPKPTNAALKTATQVASGVGAVLLAFAAAPSSGFAVDRLVTLSGFGDCGDAARPTVQTVMTDEVPNFLDAPLQLSFGDEFGASRRGTVLGNLMVFILAGIVAFVVVVAHRCAVNRSRQTVSSDLDELLLLLQSAAALRLPGAMIVIVLLLDSLVASSVLLVGYATTPNDVVLGIAGLAVVSGLLIAAFYVLDPRPLAFQAVTIPVPDINAAFTLHPKSLRMQVVDLWDRITTPSNLWEARKLYKANSLFVEHFGYLFEDCRGGRHWWILIEATTTIFVSTLSGVVPESEVACSTKAWIALAFISVVLVACVAARPMNTRVESTATIVLLGAQVVVVACAISGVGNVADIIGLSVSISSAAVALLPIAWWLVSLSCGWSCGVKRAPHSDVPAGLLRRNAPPVTTFSERDATFAALQVIIELICDPRRSE

SEQ ID NO: 2723 - protein, 1307 aa, Bodo saltans
MTSLSITILTAIISTTFFLGIVGVDAVCFCDTNAAMNASLYTLGASTKAIGWTSSTSMCTWAGVSCSTALTSLILCSSGACTSGGSLPNTNSSTLWQTIGSSLTSLTIYGNYGLVGSFPSVASTSLISLKTLLFSSYSPTGSMVLPSGSGYAMTLYYSVITIASSSSASANITSLSISYTTAPDLSNILNLKSFTALSSTVKGSNWTAMTGLTSFFMNYGDATGSLSNWSGTDFPVLSSMTLISVSGVSLLPASWSSITSLTAISIFSTTLSTGATIPASWTSLPNLTSLVISNCGLSRPLPSLALDEWSRLETIDLSNNNINSTLPSDWAGMNRLTTLTCWVCNLIGPLPPWGAMSSLQTISMAGNTFNDFIPTSWGLIPSLATLALNSSQIVGDLAFLFVSNSAFLSLNLSNNQIGPLCNFTVPTSIKSLLLNDNLCTGEHPNWTSATSLTVIDLSGNAFTGSLATIPSTKLVALRVDRGNLFTGSLPNWATATSITEIAADNNNFSGTIPGFSTAVNLVRLQLGNSNLSGALPTSLRLTNVLVNLNLANNNFTGTLPSFTGSPTALVNFDLSNNNFSGTFPSFTGSPTALVNFDLSNNNFSGTFPSFTGSPTALVNFDLSNNNFTGAFPSLSSAQRLSTLNVRFNRLTGSLRLYALSTAVLLTVDVACNSLSGTVSSWISSWNLRNVNLTCGNTFSGSIPQIASTSLVTLDLSGLGLTGAVSSVLGGSSIVTSMLLGGNVFSGTMPQFLQWASLQQFNVSGNSLTGSIIVNSGTFPVNLTLIDLSNNSALTGTVPVPSAPMPRMQYFLLGGDAHAFSGSLPSLNTIFPNLVRLSLSGSFPVAMPNAWLEGSTAWGNLATLSLRKCGFSGTLPTLLASTNLTLLDLSRNQLSGTFPSSLATAQLTVLDVSSNQLSGTLPADLDAASPLLTVLSFGANNFVGELPSSWSNLTLLSTLNMSFCNLSGGVPSALATSLQILLLSSNNFVGSVTDIALWSSLTMLVQFNISFNHFGPYCNFTVAASMTSLALNDNLCTGEHPNWTSATSLNVIDLSGNAFTGSLATIPSTKLVALRVDRGNLFTGSLPNWASATSITDIFASNNYFSGTIPGFSTSARLTSLMLANNNLTGTIPSSLIFYSALVNFDLSNNNFTGAFPDLSSATSLSVLNISFNRLSGSLRLYAFSSVLFTVDVACNSLSGSVLSWISSWNLRYVNITCGNTFSGSIPQIQSANLVTLDLSGLGLTGAVSSVLGGSSIVTSMLLGGNVFSGTMPQFLQWASLQQFNVSGNSLTGSIIVNSGTFPVNLTQ

SEQ ID NO: 2724 - protein, 441 aa, Hammondia hammondi
MRGTKRSLIFSFLLIGVGTVTAELEKQYSSEWPIPFKQNAQTLPSIEVKLAPPEDPLPQVTGEIQLLERARMRLEEGLMAKLEDEYNRQLDNSQIQISGALERAMRVFNSPNILRSAVKSSMGPLTTASAAAPEFRQLPNRKDTVPNKLTYIDVKKHVNGPIPITPAVSATSFLETSATATASSKSRFLDMLGAAETLPSVKVELTSIKEPSPQIKEKMDEIEELRADEETRMFQQAISEFEQLTKITVQELEKNIQIQMNPFLVDTEAVGSAIQEQLSGTAPASRTVSFLEVDDEGAPFLGRKCEELRTRYPGFKVECPQGKQAKPAVPQVSFLELSDTETTEQHNTLIDSETEKQLNVKVTQSDKPYPTVDELVSDMQKKRDATERLERMKILELQLKLLKAQDEMIKDGLHTSVARVLAQYAPAVEAVKAEIAIRSIR

SEQ ID NO: 2725 - protein, 50 aa, Bodo saltans
MHCIRLLMSDHNQLSGTLPASWSSIAFKSDGMIILDYNVFEGSCRVLGVR

SEQ ID NO: 2726 - protein, 858 aa, Bodo saltans
MMSMQTKSFRLFFLSISSITFAALASVFSGNTSLRSRCCATSLLSKPVQALIDEAVVTPLFLSFPRTRIRRRQQAPNHRTKASNKNVNIPLIFVSMIDSPFFFQTKDYSRAGARNRSHFQQRWTMNSTFIAIVILTAWADALRGMMTQSATSNLLLSQDVEVLAEFFVAVGFQNTTPVSSSNACSAWPDRVVCNGASITELNFVSLGLYGTIPSSLSKLTAIEQLTLDLNDISGTLPPELGDWRLLRTFTLRGNRCSGTLSATFANWTSLSSIDLGDNVHLTGTLSPAFASWGSSGSPRLETLRVQNNSFYGTLPPEYSAWGNAMLNFDVSSNALSGTLRQATQHLVNLQTFYTYSNRFSGGIPDAYASFQQIQRFTAHNNDLSGTLSSNFSQWGTNISYFNVFNNKLSGQIPESYAAWGASIVSITLSNNLFTGSFPSTWGLTMTSLTSLIMINNSLQGSLHSSFPFRALSLLGILRGMGSIDCVDHSLEQSVHWILPLHVGLTMTSLTSLIMINNSLQGSLHSSFPFRALSLLAISFNNISGTLPSRSTFPAFDAQNNSHLSGPVKFTTMTSLTSLIMINNSLQGSLHSSFPFRALSLLAISFNNISGTLPSRSTLPVLLAFDAQNNSHLSGPVKFTNPLVLLSMCGTQLCAYAAVSAYNYDCFPAGLIANQSDVAIILTLSLIYTTKDVNLCLSTVATPTISPSIPLNSTDAPDNVVEILSAAGKAYNYDCFPAGLIASKRAVNAILTLSFFWTTQNVNWCLSTVATPTITPSIPLNSTDAPDNVVEILSAAGKATTSVTVATVIASALSGVDASDAQMLVSILGSPCACPAAVAGDSSSLLQLALSPFSLIGSS

SEQ ID NO: 2727 - protein, 1247 aa, Bodo saltans
MKTAPTFVLLYFFITLFDQHGVNAACPCAHRASVIESFYTATNGASWLRPWNMAGVDVPCGLQGVTCDSILSDIIYIVVPSRRLSGTLPDSLGNLTQLVELTLHSNALGGSLPQTLAECTSLLSVNFWNNSLAGTLPPEFSSWTRIQFLSVSSNQFSGSLPKEFSAWGSSLMEFYAEGNKLTGTFPPEYESLFNLRYFRVTSNSFSGTLPPAFSSWTSLIEFNVRVNQLTGSLPKEYSAWRFLKSFICSNNNIDGSLPTEFSAWSSLVHGEVAGNQLTGTLPPEYSSWSLLRSFFISENTLHGVLPASYSSWVSLDAFWAFGNNFTGTLPPEYQSWTKLREFRVYNNHINGTLPPGYGAWTNLLRFECADNVLTGTLPPSYSSWSAVDYVNASNNMLNGTLPLEYRSWAIITTAFLFKNRLSGTLPPEYGDWIQLKHIDIATNYLSGTLPREYAQWKFIFRFQVNSNLFVGSLAPEYSTWSAMLDFGCNENQLSGSLPATYQSWKYVSVFSAYSNSLIGTLPAEYSVWNMLKNFVIQNNSLMGTLPSSYSQWSHLKVFDVRDNLLSGTLPPQFGAWTKLTSCTVDRNDINGTLPSQYAEWVDISIFSCALNSISGTIPASFGRMTTLSQVEFSNNRLTGTIPPSVLLCPELQIFAVGSNELSGTLPPECSIGLSLLSVQHNRMLSGSVPRQMLLSFFSVVSICGTAVACSSSATLTQVCLPTRINFAPRGRMSGADILDLIFRYKSQCTSLTSASTQIILSTRTRRAIEAEKNTQTGAVASDLVTITVFSSFVGGGAFSRGAMASLQRSGAVLRLAAICDPSALAPDFEDDSVQPLFANLDENPLGVALPIDSPTLEYGAGAAVFNAMLVCCVGAVLHSLHVAKLSISRSRLPRSLMRIVTLLPSSSFPGSLSTLFGTLMQPSLQACLLLLVSDERSTASCACGAVMLCVWLAFPVYCVHAVAIGSRSNGVFVLKSETRVNDDSKQQRQRRNVRWTLLRLLDEVRTAQHFLLKPRTTWTVRDNSRHERRRKQQHRAAAKRLLERMEPVFGAYVDCREWFFIVPWGLSITGGVVLGALMAAAADGDNDERCTASMWAAVVALFLGVVEVLLIVVLRPFSVRLEMIATVAVQLLGCVGSALVLAGETAAAGGVVSAAAVLELIAMVMLMLDVLEGTCSKKDRFVDGRLLAEENFVAEKADGHPSAEHSVLAKQRRQVKKGEGCGDNDAETSIQTSRLAELVRVICEIRR

SEQ ID NO: 2728 - protein, 916 aa, Bodo saltans
MSTVSNLTHTFVARTTHLAHLIVLLAMVSALLHAQELDRAALVAFYSGTNGPTSWNSSIRWDTANSSSNSCNWYGVTCGSGGRVTKIVLRNAGLSGTLPPLLGTIKKLNNIDLQSNRLSGIVPKELANCTNLIELHLQVNRLSGTFPPEFSSLSQLSIFHMSNNSLYGTLPSSYQSLTQLTSFEVDQNELTGTLPPEYSAWNSIQSFYADRNGFTGSLPPEYSAWKSIVTFRTFINPLTGTLPESYGSSWTNAVSVFIYTTNISGSIPGEWGGMTSLYQLQIFNNKLTGTIPASFGNFTKLYYINLSFNNLTGEVPWAAWSKLRGVDVFGFQDNPLLSGTIPIGFSDVLVPFLSMVSVCRTRICGPRLPALTLGYGCVPPSFVSSLGEITTAAMSSMVQIATYEPSFSCETPQPTLTPRARDVTRTVLVVPPPAPHSDHAASLATSGPTVTASLVVVSQLISGAAASAGGLHAMQALMRIQRLRDLCVAQNQLSSSLSTSSSGDDDDGSSSDCCDELTSPLHLTIDVNGNSVGEKEAGALIGNTIALVVFGLLRIVGQWTVHRFKQQHSTANFEKREASTIFHHVTTALIACFSSKNISTIWPAYTFLICPTVGVCCMLLQVGNSDGLFVAVALLALWTIPCIAANVGLAYNEHLQKAARSFSLCSVETHETKLRSSVLTAAWQRMKDFLLQPTEELEFSNHVIAKAIEHAYGAVLFGFRSSRLWYFNVELFFGIATGVLIGVTLSSSDPCSINTVGWIMAAVGLLECVSAFCIRPYCAPVDFVVLAVVNGLSVVSQMIALMDDSSSAQVASVVLGLVASGFQLVVSVLLAIDGCSGSSVYHAASVTKHDATTMVATSKERARRRSRSCSRSSDATRNCTTENSNASEFQHGALVILIRTICNSAGDAASSSIFKW

SEQ ID NO: 2729 - protein, 1342 aa, Bodo saltans
MWTNAASTAGIFLLILLCLLQLLPPFQHVAAVPEGERAAAALLLDFFTSTNGNGWNLDSDSCTTVANPSNGMNRRTLWSAANTSNNSVCSWFGVACDGNNNMIITLSLRSCGLSGTLPQSLSLSSSAASSGTKSLMLNWFDVSNNAIGGTLPSSYSLWGSSITFFHVTNNMLIGSLPPSYSAWSAMTDFSASENRLTGTLPSEYKSWTKVIVFAVYQNALSGSLPPEFSSWTSLEILLVSVNSLTGTLPSTYSLLSSLTRFEFYTNSISGTLPPVYIACTKLQLLIGFSNALSGSLPSEWSTLRQLQSLHLDFNMLSGSVPTDYFSAGGLCSSLLLFSVRNNQLSGTFPLASVVQNCPNLTQLILVVNQFSGILFSSDFPNCPTANNLLAKLAYFDVGMNSFSGSVPSNLDTCFPAMSVFSLWSNSFSGAAPLSPVVRWENISIVRLDGNQFTGNLLEIDNAAKSLSTAWQCKLTAFNIWDSIGMTGSLPEYFANCTNMTYFVVQNLTLTGTLHESYATSWAAAIQNFSIRGTGLSGTIPAAVATWANLLFFDVSINNFTGSLTFASQWRKVEFLRLAMNRFFGTLPQVLKLNTNLTSFYIQTNNFTGTLDPEYATSWPFISSLYVHENQLYGTLPNSYSAWKGLQNLYFYSNDFEGTLPAQWSSWGVSVLEIKLQANRLSGTLPPQWATWTNIVTFMVHANSLAGALPASYKAFTSVETLLFDYNAFNGPLPTDWSTLTKAAVMSFTHNNLSGTIPLSWEALNLQFIGFQNNSLLSGPVLTPRVKPVFWAMSICGTGLYGSASATGAYCFPCLPGELNTATRMSAIIQLFGSCEPGGGGQTQAPSSGTVNHTSPAPTAGLLTAAPATSSTRDATGVSIIGGAGVVAILGGDPASAQMLVTLLMSSCMCGYSGDGGALSSGGSDDGVFATIVSSLTLSPFSSLGNAAMAFGNGVLMFALVGLHALLVVLLGRCKERQDRRHPHADNNNAWRALCARPEASAAKFPNICVTCGLFLVPGVVRGSVMVLGTSSSSTLEMVAAVVSALLLCLYFVLVLEWLIYRVLILDDISSYSSGFCILRRVALLHFEPFAIENPYSPPLPRPVAAYALGRGGVWSPSERRNSFGKLVAPLSPGHVRWWVVTPLLTVLTVLLSSVPTTSTTGCDALQGTVTAVTVVAAGVFGVVRPYRAVLVSLVASFSLLVVATTSVLGLLCRHDAMSVVQVLSVCSTLSYVSLVGKVYVAVLPFVEQHLLIQLYEPSRHRSGRRKELRRVLRSGSEETRCNVDETLLVPPTGTAEQRRKRKTVVMHRHADDIQLSLQHLVESICRTRSPIMGTTFCNVKLS

SEQ ID NO: 2730 - protein, 1370 aa, Bodo saltans
MAGESFLFVATVVAAVVHSANAHGTCSCELGRSQCNPTMRLIGAVFALVRFVSVQFASAAGTCGCEHRYDLLMQFYNATNGQNWNSNSGWGTEQLAWYGVTCTDAGPASSSDITNILLSSNNLVGTLPSLLVLFANITAFDLGKNSLRGTIPDGWSAFTKLSNLNLNNNQLTGTLPAVLSSVTTLVAINLNSNSITCSIPAEWSSLTQLKTLDMSSNSITGSMPHEWQSLTQLNYVGLSSNQLVGSLPPEWSSLLLLANVYLASNSISGSLPHEWQSLTQLVNLDLSNNQLVGSLPPEWSSLTQLKTLYLPSNSITGSLPPGWGALIRLKKLDLTQNMLDGSLPPEWSTLTQLSELSLSNVGPENGNLTGTLPSSWSSLSQLTKLDASYHSLSGSLPPSWSNITKLTSLMLDSNSIIGSLPAEWAQMQSLTTLSLNTNQINGTLPASWSAMASLSLLDVGFNQIEGTLPDAWEILNSLTAISADSNQLNGTLPSSWSSLTSLYYLQLGSNSLTGTLPQSWSALVNMATLSLSGNSLSGSLPASWSKMASMSSLSASNNNLSGSISAEWSFKHLINLHLSSNNISGTIPSFIASNTGLVTLDLSHNMLTGALPAWGKLTALSSLNLGSNNLSGSLPTSWNVMTSLNTLDISSNNVSGTLPSVWSALTGLTTLSLASNALNGSLPPSWSQMIMLETLDLSNNRLTSSLPSSWSTLTLLRSLSLNSNNLTGPLPQSWSALATLESLYLSSNSITGNLPLQWFSMASLTTLDLGTNNISGSLPHEWSTMTQLTTLNLNSNNLVGEIPSSWCAMNATAIYFSNNCLFGEVDCSPDDNSTVWGLCGTRVNLDAMNGSCTNPPDPVYDWPPYCRTLSPQKSLSKTLQPSNIIISSSETVHHTITKVDRNAQLSTSHVTESSSNGDMTKTVKQSNPLIPHLPTLNIASATSFSTATSLVAIVGVVQGDPGAAQMLVVLLGSPCVMPDSSGTRRSSLQLPATALASLCPILLLTQNSDVDPAVVIGANIGLSAAVLVVQVLVVAALCWRRGPSFPLSPAEVLPVAALARFPAVSIKVALWLLPGTLWGVVQLHATDAYAGALRYIITVVAACYALGVLYMLDVLVYRRCVLSESFGLVFSEFSTPFVFSPPVPRVLAPYVCSRLGVWGPADQRKSFGSPMVVSYLPRYSRWVWVVGPLVSMAVIILNTVDPDGIISAVVACDGLQGAAVALLLATALFYAVCMPDRSVLISLVFSLGNGHNAIVSLLGLLSRHEIISRDAVVTTAVVGAYVFMAGKLASFLIQFWESFHLAKLYPEVMNSKPTGKENGIQCGEDHFVQEHHDDVLSMSFGPLSSCSEIRRRAALKQIVELICCESNLWR

SEQ ID NO: 2731 - protein, 109 aa, Bodo saltans
MLYIFGANISGTLPSSWGSMTSMVDLQLHLNSMLSGSLPPEWSSMTIVFRLYIFGTNISGPLPSSWSNMASVVYLLLHLNVPARNVVPTSPALWSKHLRHATIVMGQHD

SEQ ID NO: 2732 - protein, 416 aa, Hammondia hammondi
MGRTEAAAAAAPQAHASERRLFYGCFAVLGATMAVSHFLAPPVLLQMVVYTFPIVYIGSHASLRQNEVDEVTGEKSNKGEAMNHTDAMLFPVFGSLALCSLYVAYKFLDASWVNFLLTLYLTAIGLLALGETLHVALFPLFPDWAKDESRLAFKLCLPHIPVLCPRPSLATESEREAYEASCTHRLSYSQLAAYLCAAVLSALWLWKKHWALHNLLGIAFCIQAISLVSVGNFTVATILLSGLFIYDIFWVFGTDVMVTVAKSFEGPAKLIFPVSINPWQHSILGLGDIVIPGVFISMCLRFDYSLATASLTDGNAAKTATVGASIDIHQKFSKFYFFVVSIFYEFGLLTTGVIMLVFQHPQPALLYIVPFCLFSLFGAAALNGQVKEVLAYREDEEEKPAEAEGESETKEEKKRK

SEQ ID NO: 2733 - protein, 741 aa, Bodo saltans
MDITRLICRVQLALAVLTLGTFSDTSCPCNDAATRSALWALYTATEGPSQWTSRWDQSLPVCQWSGISCSNTTFQLSISLGANNLGGTLPDDLSLLPNVSTVNITSNRIGGPLPASLSLWGNGIDQFLAASNNFNGELPSAYDKWTSIRVFDVSNNSLAGSIPLTYSAWTAVQVFSVTMNQLTGTLPLELLNWTSLLTFDVSANSLSGTLLQGPSTNGELFWPRLTIFSAGNNFFRGTIPDAYANWSSLHQFSVPMNGLTGTIPQRFHQWALLQTFNVQSNALSGFLPSAFGQWSLLVHFAAGNNSLTGAIPGDWSQWTSLQVFGVGVNGLTGGLPLAFEQWTQLQIFDAGDNQLTGSIPPSYNKWLKLESFNVSFNALSGTLSPLLSSFGAMSTSGLVMFAVTSNQLSGPIPSTFARWTHLMYFMAGNNSLSGTLPHEFSAWVSVRSFRVSQNILQGALPATYETFTSLFSFQAGNNRITGSLPPEYGTGWTSINNCHLYSNSLSGTIPSSWGNMSTLDTLFLYANNLSGTLPPTFATLPRLSYISIAGNVHLGGTLPAEWGTRTLPFLMLWFQNTSLSGAIPLSWGSSMLIPFTSTLTLCGTRLCGPAPTTFVNAFPFGAVCLPDFLLHVEATPSNVLRYQSLVNPQPVNTVLLQTCPTTFTLAPPNNASSSTAAPVLPYHNRTSPAPVPQARLTTIVAGPLGGAVAAGVGVAASALGIYRSGGLSRVVRCGATSGNIT

SEQ ID NO: 2734 - protein, 939 aa, Bodo saltans
  misc_feature (484)..(583): Xaa can be any naturally occurring amino acid
IPKVITNLTSLQTLYFGFNRLQGTLHTEYQLLTQLTVFYFRENLLTGTLPPEYSTAWSPARFDNFDVSFNQIHGTLPTSYSKWTSVSIFTISGNLLTGTLPREYQSFQKLVEFRVTDNQLVGSIPSEYGNWSNTISSFYVSNNALNGTIPSSLAKWGATLWRFHVYSNQLIGTLPKEFGAAWTGIGEFVVYNNSLSGSLPPEYSTWSRKMNQFQVQLNRFTGSLPARYASWSVVSWIDVSSNLFDGTIPASWGNGGGDGGGGGGLVALTQLFLQNNQFSGTIPEHLLELPLLQTFSASFNLLTGSLPSQCSVALNSFSVQNNTGLVGLLPKQFSSIPQLRGVSICGTQITCPSSALTFLFCFPQTFVYRAGLDAVLSGVQYRTTCNHHSDTTTPAPPNSTTAKPSHKSLTSSPVATTTVAARSSVMYSAVASGGGGGASARGAIPSLQRSAAVLRLAALCLSSSNNLSENDSSDSSSSSVVDSXXXXXXXXXXXXXXXXXXXXXXXXXXXXXXXXXXXXXXXXXXXXXXXXXXXXXXXXXXXXXXXXXXXXXXXXXXXXXXXXXXXXXXXXXXXXXXXXXXXXLLWATRCWGIGVISHVLCLIHKYLVSTRRRRTQNGHTETHAFAITKRRIMSMLATLICMLPSSLLPGALFTTYGTLSMPAVGACVSLMISSHRTSASVASGALLLVVWVILPLYCAWELIIRGRQGRRRSEGASSSYESSSSLSSVFLLESFPTARAAKMEPHSKGANTSTKLQLKQKQRRHRSSLHTLQTMLVGALHFLLHPTSEWRRRNGSLTSNSLQRRRRAEFLLEHLEPVFGAYVQRREWFFLVECVVSWLSGAIMGAAETLATDNYPSDAGAAACSALDWGTYCAIILGVLQAAVTCWLRPFSVRMDLAIAILLQMIGVVVGGLVLGNQLFAAETVATIGALVEVIAIVL

SEQ ID NO: 2735 - protein, 841 aa, Bodo saltans
MTTFEAVSFLSRFLKLLVGLIVLVGGLVASSSSGGVLDPIPTPTSPSSDCPWNELADFYTATNGDRWFIKTHWLDNTIDCCSWYGVQCVPPNIGFHLSSNNLSGTLPSSMGTIKSIQIFDVSHNHISGSLPPEISSWSHLNYLIAYNNSLTGTLPPQYSLWGNLISFTVYDNSLTGSLPGDYSNWTALTNFNVAHNSISGTLSDEYKAWTLLQYIDVSANSISGTLPPGPGYSSWTQLQYFSVYNNAMIGSVPDGYSSWARLSTWYTHNNAMTGTLPSGLKSMTALVRFLVYNNSLSGTLPPEYSTWGGLQWALFYINNFSGTLPKAYANWTSLTYFNAAINRFDGSLPVEFSRWSNLEYFHVGSNSLTGSLPSAYASWRLLGTLAVNANQLTGTLSDAYANWTLLAYFNVGGNSLQGSLPVAYANGWMSRMTYFCAYTNGFSGTLPAAYSNWTSLTYFHVGGNKLSGPLPPGYSLWLSLTFFAVNVNRLTGTLPPQYSSWSSLSAFYVNSNSLNGSLPREWSAWGLFLQIFTASGNMISGTLPEEYTNWTSLVTFQANGNALNGTLPSVFGSSWTNLQNFDVNRNSIAGNLPLEYSWWRQLTYFSVYSNDIIGTIPANYSAWRRLVTFFVHDNMLSGTLPAAYSFWSNVTTFQAAGNMLTGSLPPEYASWGLLGTLAVGRNMLTGSLPPDYSAWTGIQYFDVNTNLIRYAAWSQITYFSVYSNNISGTLPANYSLWTTLSRFYVHNNAINGTLPPDYSSWLALQYFYVYNNSLSGTLPPEYSSWRSMLDCRVYRNSLTGALPPEYANWTSLTFWHAAINNINGTLPLRVFLMDQSHNVCC

SEQ ID NO: 2736 - protein, 166 aa, Bodo saltans
SVVSLSLGHNAFTGTLPPEWGSRSALKSLDVQSNRLSGSLPREWFLLNLTLSSMYLNGNVLKGALPDEWKAFSSLQSLALGDNQLSGTLPSSWAQMQSLTTVSLRNNAFSGSLPANWSRSPSLASIDLRGNQLTGGIPISWTTMSALSFLDVSNNTLAGTLPTLWT

SEQ ID NO: 2737 - protein, 864 aa, Bodo saltans
MCWCRPTPFPQRQWWSVMLMLVLLSSSASLGADAYCACAYRLPVLQELYDATNGAAWVRPWNMTAVDAPCGFEGVTCGSDISSIVLTGRGLDGTLPPSLGQLRGLVTFVVNTNSLRGSLPKYSSWTQLRNFSISTNNFTGSLPGAYSSWASLSLFDVTNNKLIGTLPPEYSNWTNLQYFYASSNQISGSLPVEYSSWTQLRNFSISTNNFTGSLPGAYSSWVGLGMIDVPYNMLNGTLPPEYSKWMNLQYFYASSNQLSGSLPVEYSSWTQLRNFSISTNNFTGSLPRAYSSWVELKLIDASNNMLSGTLPPEYSNWTNLQYFYANFNQLSGSLPAEYSSWTQLRDFSISTNNFTGSLPGAYSSWVELEVFDASNNTFIGTLPPEHSKWMNLQSFSTRSNQLSGSLPVEYSSWTQLRNFSISTNNFTGSLPRAYKEWLRVSTIKLSNNSITGTLPPEYATLSALNIFDVSYNNITGTIPVQYAAWKSINSLRLESNALSGTIPNALFVGWSNARIIGLRMNMFAGTVPTTLLALPALQFLCIASNMLTGTLPTAISASLVLLDLQNNTGIVGTLPFQSMFVTVCGTGVCSTALLPLQYCLSSRTVEVELLARTESTDDRNSILSALAPYSSRCTPTDATPTPVHPATRASNITAADVIISTSLNVATRSISETVAFVSSIVGSGGAVRGAVPSLQRATTALRLALLCSSSGANASSSDVMFSDPSDNALMLSVPVGSSDLEYAAGAAIGNALFVVAVGACLHAAALLRGYLCGACAATTNAACLYRKRNKAMSTDAALVAAARCACCGVRDTAAAVYWRYDSTCREQCTHCAVRCLRGCAGGGVACISAVLRAPRAGGVSRQGR

SEQ ID NO: 2738 - protein, 1256 aa, Bodo saltans
MSPNSTTTLMWLLYVCIALDAAVQGVQAQGMCGCEHRYNILMTFYNATGGNTSWRNRTGWGNTATTACATTDWFGVTCSGTDVTSIALPLNSLTGSIPESFGNLTSLTALYLNNNTLRGSLSPSWAGNMTNLSIVHLYNNSLGGSLPPQWSSLRQLTSVRLDVNSLSGSLPDSWGNMSSLKELYLRNIGVTGTLPNSWGDMIHLTVLALDNAVSSNRNTLSGRFRPSIVHLYNNSLGGSLPPQWSSLRQLTSVRLDVNSLSGSLPDSWGNMSSLKELYLRNIGVTGTLPNSWGDMIHLTVLALDNAVSSNRNTLSGTLPSSWGNMSSLVVLSLDKCNLNGLLPEAWGNMRNLTTLSLSNNRLSGSLPSSWQNMSRLASLVINNNDLNASLPTEWGHGLTLLTRLYLSSNRLNGSLPDSWSTLSSLSILDLSINSLSGTIPGSWADLTSLIGLLVTSNLCSGQLPDSWGALNLTYLYAQNNSFSGSLPESWGNLSQLDVLGLDANKFDGTLPTSWGKLSSLSLLSLYNCRLTGSLPGSWSGMTSITYMYLFGNLLTGTLPESWSSMSSALFMFLYNNSLTGPLPASWANMSTLQYMFLYSNSLSGTFPAAWGNMSSLGYLDLHSNCLFGIVPNATTFIPLLVSLNLCGTNLTGGRLTTACANNTNAPSSCVAQPYRHTATPQHSDTASFSSISATPQHSDTASLSLTSFYSVTRQTVSMSSSATVSAAPSSSLSITVASVSNESTSSPSASAHSTSPRRRRRRRRYITNNASSSTAASFGASHSPTKQNSMTYERTSSPVAIVIPAPPGVIREDTEVVVEKTGKGLQIVSAFSGGVPSSGSLARMMATKSGDGSDGGLIDFGFLVTCAADQNPSVSAARSGVVSNIVLLVVVHAVLLIAAAGWAVVKSVSFVKALAELCMPSSFMPVWIAVVPTTSDSIVAVMSQLSNSPCLALDATFLACGLAILIVPVAALCMLQRALTCKPADAGETSATKHFTCGARARSRIAWATNRTWLWDSHSGGARDAGRSVLIGSAFVVLREFRVLWYPILDTAILVIISGFSALSGDDTGDQRGWMIAILVLLTAQLVVMIVTRPFTTVMSFAYQTISVALSCLSVAFQLAFMFAQQPSASTTNTRWLLQASSVCDLVIIGISVVKMLEDVISLVSAIARRLAPARFRRDMISALPPSSVNLTSFQLQSDSINGYPMKARDEAMFIGERPVTVELLDLNEEHDPMCDEATRLDAMVDQQLPEFRVDL

SEQ ID NO: 2739 - protein, 239 aa, Bodo saltans
MKQVTDKCVSTMAVFLIIFALTETVVKSASCGCAFRYDALMTFYNQTGGNKWTTNTNWGSTIECPSNWFGITCKSGDVTKVALSSNKLKGTLWEGFSLFGNLTTLSLASNKLTGSLPFSWSAMTALQTLDLSGNSIDGSLPDDWIALESLTDVMLSRNALSGNLPAQWASMTNLYSIDLSDNSINGSLPPEWSNMVNLNKLYLSDNSIGGSLPPEWWSMTSLSTLYLSDNSIDGSLPDD

SEQ ID NO: 2740 - protein, 187 aa, Hammondia hammondi
MSFMKITSLASLALTGAFVVFKFALASTTETAAPIECTAGATKIIEAPSSGSVVFQCGDKLSISPSGEDDVFYGKECTNSRKLTTVVPGAVLTATAEQTPNGPATYTLSYNDTPEKPQVLCYKCIAETGAPAARNNDGGSRAPTPKDCKLIISVPGAEGLVTSGFDPVSLTGKFIAPGLAGLLIASV

SEQ ID NO: 2741 - protein, 170 aa, Bodo saltans
MRIATNILFGVLLLLLLVAPLNLPQSVQALCNCTTPASTVALQALYDSTGGVMWSDPWDMTSDDNLPCLGVTCDEGVVVSIDLSNRGLAGTLPSNLSSLSNISKFNVSSNNIHGTLPRELASWSLMEMFDVSSNHLSGTLPAEYGLHWNHSASKQMYFHNNSITGTHVTA

SEQ ID NO: 2742 - protein, 114 aa, Bodo saltans
MALGNSRSGLVIVGIVPVRQLLCSCSCHSDEMFSNDAGTLPTRRLPEICNCCRLVMLPHDGGSVPPILLELSARSWRLVIVFQEQGNVPDTFVPKMYSPLSCDMLDHSDGKVPL

SEQ ID NO: 2743 - protein, 445 aa, Bodo saltans
MVQNDFTILEEFIAAVKFTKPSVLNQTSACDGTLVACTSGGFINSLNFSEQSLTGSLPSSLENLTNLVSFSVSMNSLTSTIPYELSRLGSMLRYFDVSSNLLNGTLPSSLGNWSQLQRFDVSNNTLTGTLPENYSSWGAFVTQLNFERNAFVGELPSSFGTAFSSLLTLDVSNNKLTGSLPESYGHLKSLQLLKCSNNTLSGTLPASYANMSSMQSFEVENTLTGTLPPELSVWGDTLEKFDVCMNELNSTLPDVYSKWTKIEIFEVHSNSFIGMLPSNYSVWTKLTEFLVRNNALHGTLPAEYREWTLLTVFTGTSNSFSGTLPSLYSRWTNVKQIVLGGNSLHGTVPLSWGASMMKLQTLALSNNMLSGTVELSSTNLLFLSISFNNFTGTLPTTSWPVLLLLDAQNNTQLSGTLSPWWLLQIASICSTKVCSSKKNITLACF

SEQ ID NO: 2744 - protein, 619 aa, Bodo saltans
MSTSNSTSNTTMYLYCNQLEGDLPDEFRSMSALKSLFLNENQNLTGPLPSSWGTSTNILRLASLNLQNTSINGSVPPTWSSVILPQGVIALCGTDVCGAGGLTGSYTICIDDVAACDPRNQSYFIAHSALYLPPACSRSSTPAPTATSLTPTPGPSATTTNQSKFNAQQSAVVAVTAPMGSSLLWLVQLLLPAAQFAGAAMRLVTCGGDDVQLLATAGGYLGAYCIACVGCCVLLGWRVRHSHNLLQQKPPAITLRTRMVESVEHLGRLWGVLSSVVAPLVEFGLSLVLLPGDDGSNVAGGGAALGGVAMCAGVVSLSWLLEQHFGAVWQRNSNGRRIASSRVVNVGIKEGEIVRGGKLHATLTPVGWSARCCEEYNHSRLGRWVDNDNLQRPHQPAFVECNGAVFEEYGNRRTWFVLWENGLAAILSVLSAVSRLSSSVCTAVQIVGAVLQICGLTVLVVARPHRKLKALLLAVAMEAFGFIGGLCLLVSATTSTDDDPWGDAASVALQIQLYAGVALLILDGLHTGRIQDALRRFVATVNPSSSFEADKFRQRQPFGVDLQRANIRLKRSSNVASPSLSSNINRSRSKNNKNNNPLGLRPDTTLTVLIEMICSRHTF

SEQ ID NO: 2745 - protein, 333 aa, Bodo saltans
CSHGTLCPISIGTLSKLQRLNLCSNSLTGTLPASWGSLTSLETLCLRFNSLSGTLPESWGGMLSLKELSLDSTRLNGTLPTSWGKLQGIQTLDLEFNSLSGTLPASWGNMSSLQTLFLNSNNLSGNLPASWGDMHAIQTLYPQQEPSHGNLPESWGNMSSLETLYLYVNNLTGTLPSSWKDLNNIQTFVLEYNTLSGTLPPSWGSMSNLQAVYLTSNNLNGTLPASWWSMSSLQFLDLSSNSVSGTLPAAWGSMLNLQELYLNNNPLTGSAARVASRIGAALAAIAAAPSAAFAVGRLSTFSGFGACDDVAMQTVASEMTDDVPIFLEAPLQL

SEQ ID NO: 2746 - protein, 1423 aa, Bodo saltans
MALNIKSCCTLAAVAVWFMCVVAANGIGMCGCESRYSVLMELYNATNGSGWLNHLGWGQTSSCNTPWYGVVCNGTDVSELNLDSNQLYGTIPSSLGILSVLRVIKLQNNSLFGTLPPSLGNLAQLLHLNLRSNDFQGSLPESWSQLTSLNFLNLRSNGFVGSLPPSWSSMIGLKKKLNLRSNMLNGSLPDSWAAFKSLELLNLRSNKFTGSLPSSWSNMTQMKTLRLEDNALNGTLPSSWSTMSRLKRLHLNDNSLSGTLPPEWSAFTLMKSLHLSSNDLSGTLPSAWQSMTFLIHLKLRSNSFTGTVPSVWSSMTILQNLSLRSNYLNGSLPASWSSMTKLAELSIRSNDLTGSLPTSWSAMIAMEDLHMRSNGFTGSLPAAWASMLKLQWLNLRSNNLTGPLPSSWAVMTTLETLDLQNNNFIGSLPSSWGAMTNLQELHLNNNQLNSTLPVAWGQMESMEDLDLSANQLTGLLPSSWGNMTKLVALLLDENCLEGFVPGSYSSLALANVSLCQTRVHRRMINCSDDHQWPSYCESFISSSPSFAASESMSISASSLASESQSRSNTISDPASRSTSAKTSATLLRHDAPSNSTTPTMDTTRTISSSILTPTVSRSTLLSLGSLTPSQSAMLSGSSSHLSSTAATTKSATSITPKLSAALMQGEATDSLSRTISFTVSVPTSSSSFSFSSPSSYTPSTSSFRRRSLSSLVSNSAHPPQTLSLVDRANLSRSFSLSTRMCGGVFSYTTFVGLTNVVLTSNATTYFVEQPPVVVLQLPNDSQRVAVMAATANVVTLPVTRSVLSNRPALLVNISLESKLSGHQLQWLNITNVTRISASHQPCVFRISNQTFVASSEGFTFAVVVVIQPPENGWLAPGTSYFVDSSIMLVASLACDESVVLELAINIPCLAVPLASIASKVEAATKYSLIAAALTGGASSGSALGRVMATRSMVLCNADAAVGGGAVELHFEICGDDDPSSLVARSAILSNVLLLVAAAGTLFVCAAAWCFLCHTTFYEALLVVCLPSSVLPAWTVTLTSTSGAATLLWARIGASPCPIVDSLIGVVGVVFALCTTVVVILTWLDKVQLATDAPGFWRCIPVVHVARDADEQRNLSGWHPNLHLVTRVALHKRWRWTTTDHHSTEQPLKMSGGRRDDSLRAAAVLVSEFRVLWYAALDQGLLVLFACLSVVSGLNQVDDTLCRAATIITVALLLTQLIVLGIAHPFTTLFSFVHGLLTLTLTTVSVLAQFLYALLASSTTQDLWLIELTAGCNLAIVGVSAAKMLVDLIELGSAAKRRLLSASSLRSARRIIRQETHDEDVEVKTMLLRSHDDFSLEEESMGLMPLAEGQSNDNTLSVNFDSNVPHYFEMADSSSDNSNINFAPTDSLESSHVVRTEAEYSRLGADLSMAVDTYFLLAGPSDEN

SEQ ID NO: 2747 - protein, 149 aa, Bodo saltans
MPFLTVWAALGLVLCMPRSTLSTPMCGCEHRYSLMMDFYNATNGAGWTHNNGWSLTPASCLTNWYGVYCYYNDVQEIDLPNNNLTGTLPASLGNMSQLVQLSLSSNSITGTLPPEWQSFKLLRYLYLWSNSLSGTLPTEWSNIFWLIQL

SEQ ID NO: 2748 - protein, 658 aa, Hammondia hammondi
MPTESRSILAMAEETRWRHLSRLLRAGLVFLLFDVLTSCLATPGLQNTVIRSSKAHHLQLLFSTRSTPAMKFPLDATLSAPNSFGEQEARSVEAVKQNPWATTSAFADFMKRFNIPQVHGSGIFVDLGRDTEGYREVGGKCPVFGKTIQMHQPAGYSNNFLDDAPTSNDASRKPLPGGFNNPQVYTSGQKFSPIDDSLLQERLGTAGPKTAIGRCALYAYSTIAVNPSTNYTSTYKYPFVYDAVSRKCYVLSVSAQLLKGEKYCSVNGTPSGLTWACFEPVKETSTARALVYGSAFVAEGNPDAWQSACPNDAVKDALFGKWEDGQCVPFDTKTSVQSDQATTKEECWKRVFANPLVASDAPTTYPEDAQKNWNDFWPVHEQSSPKSGGFGANWANFYLEKESGKTVCAIFDQVPDCFAPVMGAVAYTAVGSSTEVNLPQCDSASFIPIEGPCNNCVQVVTECVGNQFVQTSKTCCTEPEITPPVEPVEPPVEPPVEPPVEPPVEPPVEPPIEPPVEPPVEPPVEPPVEPPIVEPPTEPSVPEPKPPVVLPPTPEEGGGGGTAGDETVEKEGSGGNTALIAGSVLGVTIILALVGTCVGLYYRKRPVPPTERPTVEASGGREVEGPSDVAVPPDHSWWGEGEQETESLLGSRAVDAEF

SEQ ID NO: 2749 - protein, 1032 aa, Bodo saltans
MLVTNHHHHQTFKGTVPMPLSHLSTGFHQTSELEVRCRLQWFAAMCGCCVVVVSALLSSTVDSLPFQVEVDVISEFVIATHYANATPVTQGNLCTSWTSMIVCSNDTVVALNFMGANLKGTLPVSLSKLINITHFDASNNSITGSIPHQWSSWGGTIAWVNISFNNLSGMLPPELSNWSSMKRFSFSNNQLNGTLPPEYSGMTGLRFFDVSYNSLSGTLPNEYSRLTNLESFSCQSNRLSGSLPSSWRSLLNMTKFTAGNNGLSGSLPPEYASWSRITSFVVDGNAITGTLPPEYANWTEMDVLVANNNYLSGTLPIEYSEGWSLISYLRIRNNSIHGTLPAEYSKLHLISLLDASSNRLSGTLPPQYAAWKNVTSLSFPNNMLTGTIPVSWSTGMPLLWSLILYNNSLSGTIPSAPPFPSLNVLSISANDFSGSLPSPSTWPHLLILDIQNNTHLYGSAALQQSLSIVSACGTQLCRDAAFTGTYVCVPSGALANSIANGVTLELLVALAAYTVTQRSCSTTSVAPSAAPLSLGKNNATYEFLPTYSINTISGVACAAALGAALSAVEAADAQMLVSILGSPCVCSTTTLPPQQQEESVLLLALSPFSPLGSAWAAIGNSLLCCVVVGLHATAVFMLFAKVPQAIQQPRRTPFNTWLGRWLQKNKSNDSRTRRRIIAQLRFPNVSVTLLMLLVPGVVRACMMTANSFVNPGNDSDGDSPLLSAVAIAIGVLFVLCACGFVEVVAFRHANAEVMSANSRRSGVNHLPREAGEQLLLHFVRHQNPTRLFKPIPRRIALVALPRGAWEPQAARTAYGGVVSSYLAPWRRVWVVVPGANIVVQLLNGVGGDDTTCDALQSITLIALACVCVFIAYARPHRALLASYLVCASLVLTMVTALLGLLCRHGAVSSDAVSGFGVFASVAMFVFKLYHVLMPIVERRLMARNVGLVASPSCAIRPVVSAEAADFNEVSDPRWRRNVNATAAVEEAKVLPLSNEQIEAQRKRLSIEQMKALRELILMVVERSSDGGAQLLL

SEQ ID NO: 2750 - protein, 993 aa, Bodo saltans
MLAPRVAYHHHYVVLLLFSMALVATIEASTMCDCRHRFSLLMELYHATNGSGWINSSGWEESPADCSIDWYGVACASGDIRAVVLGSNNLVGTLPPSWGNLTALTDLGLTVNRISGSLPDEWGNMTNMINLQLTGNQLNGTLPSSWSNMTQLVYLFLGSNSIAGTLPSSWSTLQHLHYLYLHLNRLEGSLPPQWGALTTLATLLLYSNSLMGTLPSVWSNMSSLVDLELYDNALNGTLPSEWSRMSQLQTFLLVGASVSGTLPDSWSSMISMVNLQLYRNSLSGTLPSSWSALHNIVILYLDQNSLTGTLPSSWASLGSLMYLQLFSNSLSGPLPPTWSVLPRMTYLFMHTNNLNGTLPESWSSMTSLKILYLALNSLDGALPNAWGSLQQLIGLYLHVNNLNGTLPSSWGNMLHLQALHLESNSLTGTLPSSWSTLSSLTTLTLFSNSLMGTLPSVWSNMSSLVDLQLYDNPLNGTLPPEWSRMSQLQTVFLLATDISGTLPDTWSNMTLMVNLQLYQNHLTGTLPSSWSAMRNLQYLYVFSNSLIGSLPDSWSSLTRLVDLQLYSNNLNGTLPSSWGNMLHLQALRLNSNEFNCALPSSWSTLRSLRTLSLFSDSIFCTLHTCGVGPFFNRLQGTVPQSWFALPLLQQLNLHSNCFVGSVPELATSNHLLQQSDAINVCYTKIRGYERNVSRCPGYQWPEYCAWVWSHTHSGSVNDSTSPGLLTTSRSQDLSATLSNPSRTSTCTFTTSNNRTPASSHTVSFSRTTSETYFSLKVSMSLLSHKPTETLSDKKTKTVTAPSLSQWMCSLPVHNVSAQLTPLTAMVLPSDDGSSVAFVTSAVPVALDLVGLPIISVTTSTIARTVLTTHGLRIAMNVSIPTPSDVADRWIVGNVTMSGAILNATAQSTNQVPWSVVLLDAPPIGWVDASSSQLEDRTLSIDVSMLCDGAEVLTVRVLIPAPGVPRLYAEQIATVGRYSQVASAIAGVSTGPAL

SEQ ID NO: 2751 - protein, 105 aa, Bodo saltans
MLLVVLQALVFVAVSVAAVTQHDVDIIVDFFTAASFAHSTNIETTNVCTQWPIYVRCSNQMVEAVNMSSMGLRGTLPASLGNLSTLKYFLLSRNSINGTIPKELS

SEQ ID NO: 2752 - protein, 149 aa, Bodo saltans
LDTNALVGTIPNSLFDGWYVATSISLRRNSLIGTVPSVLLALPMLQVLYLCLNMLSGTLLPSTISQPLMILDVQNNSGLVGSLPVRNIFVSLCVELAYAPLLSCRHSTALQIPRKCPLLPALQLVRSTCNKCKLTCGLHFLCTVFTACW

SEQ ID NO: 2753 - protein, 377 aa, Bodo saltans
MWTLISICRLLVISLRLIALCDVAGASMCGCEHRYALLMDLYVANNGPQWTNNTGWSLTPNHCSVDWFGVTCSGGDIVSVTMNSNNLSGSLPSSWWNMTRLVDLELYANRLNGTLPSSWSAMSSLQTLLLLSNNLSGTLPSSWFSVTTLKKVYLYDNSISGTLPVSWSAMTRMENLRLYRNSLSGTLPGSWSAMTILSNLQLYGNNFSGSLPPEWSSMTQITTLALYNNDLSGTLPGSWSSMTMLSNFQLYGNNFAGDLPTEWSSMTQILTLDLNGNILNGTLPASWSAMTRMISLSLYSNSITGTLPPEWSSMVQMTTLAVHYNMLTGTLPGAWSAMTKLSTLYLQTNSLTGSLPAAWSAMSTLQTLYLSSNSLSG

SEQ ID NO: 2754 - protein, 2060 aa, Bodo saltans
MLRRRFFTLASIAIFIASLCECDSNELRDALDDIRTSLNISSWNTSLSMCTWAGVTCTPNGSSLSSLTLCTTTTAPCVGSNSSLPNNATTWSIIGRNLTSLTISQGLFPFPDNASTSLTMLSSLSFTFYSPTVPMQLPVGAGYAMTLSSSNIILQASSNAGANVTSMSFSSSTVPDVTNIASLTSVTITSGTLGTLNWTLMTHLTSISISSSPLINGTLPNWTSTNFPALTSISLNAIGISVTPTSWGTIATLTSIGITSCTLLNSPLPSEWSNLTNLRSITLSSTPMTGPLPDAWANLVNVTIIAIGANFSQATLPSAWTNMTSLISLTISNCGLGGTLPSWPSTTTALTYLGLSNNAITGPLPTIVAGWSKLTTLDISNNPINSTLPVWGALRSLITISMFSCNISGPLPQWGAGSISPMSNLQTIVMNNNSLNSTIPSSWWNMISLVTLNANSANVIGQLDLIWNATRLTSLDVSGNSIGPLCNFTVPKSLQTLALQNNLCTRQHPNWTTATTLTTVNLEGNAFNGSLAIIPSSSLATLRIGGGNQFTGSLSNWTSAATTLTELSASNNRLSGTLPTFSNIVTLLLANNSFSGTLSILDQRAGLQSIDVSLNNLSGSLPNLSSASSLILVNLSHNRFSGSLTLAASLSSLKVFDVACNSLSGTLPAWSSSLSLANVNVSCGNRFTGTVPPLSVASLVVLDLSDQGLSGTLTSIISVSSSPSSKITAMLLGGNSLTGSIPQFLEWENLQRFNVSGNQLSGTISNNRFPSNLSSVDLSNNLLYGTIPVPSATSVFPLMQHFLLGGDDHNFNGTLPPLNKTFPNLTRFSLSGSFPVNIPYEWLNGPTAWVNLTTLSLRKCGFSGTFPSLLGRNQLTFLDLSRNRLGGTLPADLPNRTQFLTTLVIGENAFNGELPSTWSSFSSLKWLNAQSCDLNGTIPQLPSSLVTLLLGNNSFTSDTPDVGLVLPHQLVQLDVSNNNLTTLPSIKNLSNLTMLNISHNHFPSMELPSWNESLTSIVALNVSHNQFIGGIPLDWTTSMTSLASLDASANQLNSSSLTLESLLGNVAFPRLQILWLRENNFTTWDDGGTNAVIGNAMMDVDISNNFLTGALPNTLFTNATNLTSLQLQGNALNSSLPKVWGFDNVTPTSLMVLNISSNNITGPVPYNWGGLLRRVNFSIDLCFNSICGPLPKTLPSSNNSGFLRCPGSPLLTIDCYSRSVTPSPINLTETSSRSLTLTMSLSASPSSSLTKHKSVSSTKPSMTQSTSARQTNTTSSSLSMSSSPSLSAEPLSPSRTGSARSLTRTKLLSHTHTQTFGSRTFSQSATVAKTCTVTTTISDGTRSPNNTVSHSAHTRSASRTRSTLLPSVSHSLFTKTLRPTVSPSFTPTPTRSRTPTHGKTRSPTRSKKSPTPTATNTPSSSISITSSKGSLSETRNSSNTRTLSPLLGSVSGTRNRSETLSNSIILVDSSADSFLKAVKDLTATASALTSVLSAADISNVNTLMLMSYVDCTVNGKKDIDSMRDGTFSSYMISPFMDVGWAAVAWGNLALGALALLLNAVVTAVAAMIDARRRSELSGDLQAPHMPITNAFYTTVMGDVRASTVFPPFPAIGIRFVELWTSGSVLGAFAELMTASGGDEGVRYVTGILVMLSCVGVLVGWQMTLMHRVLPRTTFVEYQLGVLRENIEAIPGWAPWWLLPVGSWRPPPVRQRFDQLFMPHNSPWSAKCRVCFHIGISFISSLLTAVSFVSSDSCEIASSLLAVTYFAMAVFLARFRLYRAPFETPVAVAVFLLLGVQVTFIAAKESAPTWISLVQTLLTILRTVLRMISIALESDMEKYSFFVADDKEPETRRGNAAAIDFGYYDRSEDSDLLRPIEMVAAFGARRHDDDDPFEQDVEWRGNDEAEVEMLVDEEEEDPLRVLNPIDDHVVTAAGTFTSPVASSGSGGAAVRRHVVSTQHGSPSKKHAAMRTPLPSEERSDLELHYFATSDGDSNGKKSEEIVGDHHSGVNTIVIVRSTEDEDDEDDEPPPPPSPPSSEGTDFDYDLVDVDYDNQSYNGMLL

SEQ ID NO: 2755 - protein, 109 aa, Bodo saltans
MSSLRRNPQRRCFEDAYPPQQVYITAAHMIRIMIAVLTLLGFWPHHHHHYAHAASCGNCSRVFQELYDATRGAEWTSPWTVNDITSNPCGLTGIVCSAENNVHSISLAG

SEQ ID NO: 2756 - protein, 431 aa, Hammondia hammondi
MGAGWSDSNNLYIWVNKPTYAPGEQVNGEVFLNVVEEIHAARLVLYLDGEEDVSYVDSNEKLRSTFVAEKMVYFSESHTLLVVDGTLATGRYRFPFCFTLPASVAPDCSVAGGAAAGATQAPFAGHVTYKVRAQIEKKGEPTLKKSSLSRVASAAALAEDAGKESCAASCATDNFEVVEVSAETPEQLADLMKAMPSHGFLKKKLSTAAEAKPLGDLCQEIELSISVPAEEPEVTLCEFIEHFKLLRCIPLGTLRANVTADTLSCFPGDCVTVTVDIENTTNKHIQQVVVSLVREVIFSVEGREKFSVREVVASKTIPGPPREKDFRAFGPQKVNVTVPTESQPSMTSSLLRLRYKLETFFRLGQKPHTFFLDFSVLKKTPTVKEHLTKLHAPKEWHRVPLLPETDLAVIQLRGARPPVRDDYIDAGSIIC

SEQ ID NO: 2757 - protein, 104 aa, Bodo saltans
  misc_feature (89)..(104): Xaa can be any naturally occurring amino acid
MLVPCIVLLVGVVLQLATVTAVLMSSERNALIAVYNNTNGASWRVYSDEPPQPGWTGGVGVWAVNNVSSDPCLWYGVMCANNIVSTLAXXXXXXXXXXXXXXXX

SEQ ID NO: 2758 - protein, 326 aa, Bodo saltans
MMTARGEVIAEEVVQQDIDRSLRRIQEAIDDPSGRLKLYLNNLSFPQVDYSIERIKSLEQLFCNHNPLLSTLPFSVCQLSHLRVVDLNHCALTHLPEDLSRLRSLERLDLSHNLLTRLVWDVSRWVDSLKYLNVGNNRLEYFSPSCMELFLALRRKQQANEKVQLSTEQALTLFPNPCLFKPNATSHMSSVQEEQHLLGAMLPDGVENCANCGAMVIVGQPRVYVHFWVWLSGEAQQRLHEGGETTSDGGSSVPTRSLPTSVEERHVAPADRATANPQAHHHGLQSRIPIFYALCTKVECHMQLHKHVSMSDFYTEAGAPQRPRGL

SEQ ID NO: 2759 - protein, 1149 aa, Bodo saltans
VDWFGVNCSAGDVVNVTLGSNNLTGTLPSSWWNMTNIVHIVLSANSLVGTLPSEWSAMAMLSTLDLSTNRLSGILPGAWSAMTRLTILYLQTNSLSGSLPAEWSALTTLQTLYLSTNSLTSSLPPEWSSMTQITLLALNGNMLNETLPNSWSALTKLEGLFLSSNNLSGTLPSTWSAMTRLQGLYLSANSLSGTLPSSWSNMTSMVDLELIGNSFAGSLPSEWSGMAQITTLALYRNSLTGSLPAEWSSMTQLANLALYSNSLSGTLPSSWSAMTRMISLSLYSNSITGTLPPEWSSMVQMTTLVLNYNMLTGTLPGAWSAMTKLSTLYLQTNSLTGSLPAAWSAMSTLQTLYLSSNSFAGSLPPGWSAMILMTTLVLNGNSIIGTLPSVWSAMTKLSNLLVQTNSLTGSIPQSWTSMSSLRGLNLGSNCLSGAVPASLLWNLSGALSLCNTKLRGGTNLATRCAGSDWPLYCYRLVSQSATSSTSRSSPQSITFTLPPPASRSSTPSLSLLGGSTTSSTSLSPTHLSKSTSSTVVQCAVAPPGTVDVWLAPPTNELLVVPNSGVLLAMIVSGTYVRMNNTGSAVNLVGSPIERRVLTSSSSSPSIGLNISLLGPLSSIGYWKIGNVSSLVNHQLLSYEAVSSNTVSWNAAVVLAPASGWISASVPLLVGQTFYVNVTLMCYGASMLHVLVAVPAPGVPQQYAQLVKASSGYAQVASIIAGGASSGSALGRVLATRSMVLCNADAALGGGVIDLNVNICDIEGASDNRCSSHSTLCDRQQHPAPWLCGGGGGTSLRSMGLSELQQGLFSSSNPRLVPSFVAAIGVDRSGPLVCVKRGVPSCRATISSCVGVDVVLGVLGLLVAIVPCAVFALLWCVRVAGGESATWVCVAKHEEAKHNHRHHLLHRLLRRRYEWRSALDDHEGRATPSDIKAAWVVLLEYRELRYGALDAGVLAAVSCVSVLSGLNGSTTECRGWGLMTVLLMTAQLVVLCALRPLTSMCSMILSCATLLLTILGSLLQLVFVWAFSTNTCGLWLIDVSAVLSLIVVGVSIIKMGLDFFQLMAAIRRRIVAIAQPPPNLLELTFGDSLLEKSVDSDALRFEVDTHTSTEEQRSALMMTEFVTQHDERFWDTSGAALGTELVDGHSDILR

SEQ ID NO: 2760 - protein, 236 aa, Bodo saltans
MSSIQSMDLSSNSLVGTLPSSWVNLHRIQTIALNFNSLTGTLPSSWHNLSTLNKLGLYGNKLNGSLPSSWEDMISIQTMDVSSNALSGTLPSSWGNLVALSRLYLDGNILNGFLPSAWGNMSSMKYLSWASQCTQVVREPSRNVVTLSDPPKREPFQAPREQHQPQQPRGPQQQQQSSYSHQNSQRSCAQQQQQQQQYGTTTATLLEEEAAPTTTLRREGEVTTEAARAVELPWWS

SEQ ID NO: 2761 - protein, 404 aa, Bodo saltans
MQVTTTSAFLVAVLLSVASLVSATPAAQVSALEELFKSTNGHQWTGECGNGWASTTVPTCSWFGVTCDGSDNVIGLTLVQCGLDGPLPLGLTALEHLQFLALNFNSIRGPLPEWSSDFTELVSISLFNNSITGPLPGSWANLVNVTSISLEYNAISGPLPDAWGNFSSNSLATLTLQHNAITGPLPAAWGMYSLPQSITTLMLSHNAIDGALPMEWFPFISNTLGLSHNSLSGELPSWTGTSFSDMIGTLDLSYNQFSGVIPPWTGINQVSLLNISNNNLGGWIPASWTSMSYTTLDLSNNQLNGTLLAPWSGYVNYLHLQGNALSGDLSNFLNSFLSQTYTLDLSNNAFTGVLPLLTYSNWQCSNCECSLNLENNFLTGPISEEFCGVLSSVFFLAIPQRNKC

SEQ ID NO: 2762 - protein, 1385 aa, Bodo saltans
MASSIGALMLFIACFLSQLQSTHCDTLCGCESRFSALNALYASTSGGGGWTVRTGWGSTPACSSKNWHGVYCDGVDIYALVLDNNNLVGTLPSNLLQNFPELQVLYLDGNPLLRGLLSDGWSAGSSQIQNLSLSDTGMSGTLPAAWSAWTSLVLLYLDDLQITGTLPSSWSSMVNMSWLLLGNNSLTGTLPPSWSSMRKLQTLDVDTNSLSGALPTSWSALTQLQKLYLDFNSLTGTLPAGWSSLTHLQVLQLCSNQFSGTIPSSWNSAFTKLQVLDLSENDLSGTLPTLWSSFTMLQGLYVNNNWLTGTLPATWSTLVQLQDLFLSNNSFSGTIPEAWSRLSSIVNLYLDSNNMTGSLPSGWSVLTTLQYLALCNNSFTGTIPSQWSMMRALTSLWLYENRLSGTLPSALSALTSLLVLNVDENCLRGDLPTTYTSLNKAVVSTCQTHVTLPSGATAALKSLVAPCPTSLRYAWPISCTVTSTSSASNENSLETSVTLSPNSGSRSATTSKDDSIAVSESATRVYKTKSFSTGFSESATHQHSLLTLSSSLVVETTSNLRSRTFSASTSTTHSNTFHKTYPVRSESMNSPSQSCSIDETVSCVPLAAMMSLVMPERSCGGNNNGNWSGGIANLTEVTSALTRFHWWPAVCGGANDSGGDSTTTTSHEEDVDFYISGDCVVIGSDNMTTFVVAAPTVVLRLGNGSSSMDAMHAIEAHVYFPRIPPSGAQAISTKGPWSLVLPFTLGGVQEGSSSTSGHEWVMTAPPSFTDSPRASAVTNVFLSSLPMNDAGGCNTTTTTTDHARHKTSLPATAIDGFITYQLQTNDTSQLYGNTTTIELAASCGPSETPSVTLIRIIIHWPDARTSLIPSASTASIVPSSTATEVFTTSATMGTAIGGGGGAAASVVSTAILSLLACTENPPMSSTSYLVSFFFQYGPVAMAIGNAGLMVGVFLLHTVVVLSMAHISRQRPQRLSAATSSTARPGTIMTAAEDATSGSWSQQEGNGFIGRLVDQHIDTMKRCRFPSLSFAVASFLLPGCTLGLTAGLLRQSGGNGSGSAASGGNIFLCIVALLCVVFFAVVVKPALLYYIVFPRATFTPYRHYCIGTPIEKQWLFPKAYWTPQHIRTAFSSCMSTMQKPYAAICLTVETCLSCFIGVVAGVYMGGYCHTPILAIAAVLHLAYAIVLGVLRPYRMPMNQICCPIIYALMGTLCALKYRHLLSSAPAISSTSEDALQQIIAVLQIWKAIVSMFIGFGREPHLRAGNTAVPDNVEDHLELPLTTLLLPVDDDLHDHVAMVKLLPNDDLQSDISSIPDNNEGISGDEAQRELLTLQRETNEDDERRVNESHFWDTQGNAVAEASKCEESEREISERANDFETPFHLYSL

SEQ ID NO: 2763 - protein, 717 aa, Bodo saltans
FNNFSGQVPNQYSSWALIEELYLDNNNFTGTIPPSWATSFVALTTFFVSHNQITGTIPSVIFQTATILYLGFGFNAFSGMLPTTAIATSNILFLEVQNNTNLVGSFPTLLFGIVCSCGTSMCSTTSSLTVLYVCIGNNVRLSELISGGVSRTALLARFQSFTYTPTCPIVTTTVAPLSVTTFPPPSANAATQTAALTTTSGTVRASAATVSYVAIVASGATAVGVSTRSAIPNLQRVLTALALSARCKQRTASANTNSSDTAVDPPYNTAIDNPLVLEVPIETDSLVYAAGAAVGNTALVVGVALVSHLLGVGVIPFFERRLGSPTRSAGTTKEAPSTCRVLVTAVVGLLPAAPLPGSLMLLFTMLLQPSIASSVTLWYSSGRSAATIAIGCVVVLLWTAAVAWFVYAVLVRGRRASLSARKRAPKAARFFAALDPVARAERGRRSRSSASDWLRRLLGVLFSPTEEWTAFRTRDDARRQRRSHVYWLPESLIVLIEPYVGARAWYFAVEWAVAAVSAVVAGVANAITTDADSSVAAVCAAAEWGGWVALVLTAVDVLLCAALRPLSVRWDFASTMVTGSLSIVAAALVIGGLSTEADDVATAASIVQLAMMLLMTLIEVGRSRIRRNGTTFPLHGNTHKTPALSVATSLVFTDSSRPHLRAPLSAVATTGSIALGVELLNFQLQHLKSSEERLEILLTLACRRRDEKTKSRISCES

SEQ ID NO: 2764 - protein, 598 aa, Hammondia hammondi
MSRSIVQVFEEYQKARVQFVQTVADLSSRPQNIETLHSAGVMSLLRPLLLDNVPSIQQTAALALGRLASHSEELAEAVVTQEILPQLAHSVAQQNRFYKRSAAFVIRAVSKHSAELAQAVVDSGALEALTTCLEEFDPQVKESAAWAMGYIGRHSESLAQAVVDSGALPLLVLCFQEPELPLKRISASALSDIAKHSPELAQVVCDVGAVPLLAKEITHVDAALKRQVCACLGKIATHSVDLAEIVVEAEIFPKILHCLKDPDEVVRKNAATCIREIVRHTQDLAKFVVNAGGVAALIDNITDARGNNRLPGIMALGYIAAFSETLALAIIVSKGIPPLKQALVEELEDHLKAAAAWTFGQIGRHTPDHAMAVAEADVLRKLLRIHLDPKASDDLQTKTKRALKSILQKCTHLAALEPLLNEAPPPILKYVVQQYAKVLPNDVQGRRSFVQSGGLEQLLRIRNSEAGTSIADYVEEITELYPREIVNYYSPGYSEGWTTAPCHCVLNLTIGARMVQLLSNLNSLSISTEATSLCNAGSAAACTRVVCPLTVYSSMKKVSEWTRSIRVYSLGFSFQIRDSQVLSGTLLWAASRVIRHGR

SEQ ID NO: 2765 - protein, 293 aa, Bodo saltans
MRSLNDFRISGNSLSGVIPTAFGLLPSMAVFSISNNDFSGILPVFSSTALVEMQLTRLNQFVVHNNSLSDTLPASYSMWSGVAFISLHTNQLEGTIPAAWPSSVLNLSDFRVANNSLTGTVPAAFGKLSFLTSFSISSNAFSGMLPGFSSSSLILVDIQHNPQLDATLPPKLQAWTTCHTSIPCTDSLFPMQYCMPRNYDLFSDAAKNFATIAPYAYHCTNAPQTSLEPSEPITTPTPQPSVISAIASAGITTLDSEQQTHPTVRCLWCSAAGCVACVRSGLRLPRAGGVPHQ

SEQ ID NO: 2766 - protein, 1198 aa, Bodo saltans
MKCMKVLPCLIDIQRTIANRAEGERGRERGTKLTLTQRGMLLFPLLVAFIPIFCLSAPPANSMCTCQNASFNTLMDFYNATNGGRWYDRGGWGTPCTTWVGVTCSGGNVTQIYFYSNGLSGTLPNSMSNLTSLESISLQYNALSGTLPASWVLLCNLTTIDVSFNSLTGPLPESWASLPNLTALKLQYNSLNGTLPAAWANMSSLYQLYLTSNSLGGTLPASWASMSKMQYLYLQSNSLNGTLSGAWCAMLTLQSIDISYNKLSGVLPAQWGSMINIGSITLTSNSLNGALPDSWSSMSSLTALYLQYNSLTGALPASWANMSKMQYLYLQSNSLNGTLPAAWANMSKMQYLYLQSNSLNGTLPAAWANMSSLYQLYLSHNALTGSLPSLWINFSWLSTLDVSYNMLSGTVPSSWITNMSTLFGYSLRVILSSNCLSGVILAPPTLGRHVWLEICNTHLIAVSNSALTVYACASNANAIHCRNSNESSSLSSSVVPTRTTTTTATIDRSASNSLTLSGSHSQRATATTTATVSNSALSLSSSHSQTTNNDTTTSATLSESPPCGTPFSLETPYSYSSNDSSLVLCCSNDSSVCTTPKTALSVNDNVTNNTFSGGSKWIWSINVLGGDEVPIITCGSVEGVVRVPFCIPSSWRVLNVASNTSINNFSLEMRNASSSQQEHADMVTCGNATTHNAQFDSLLYGTTTMIAFDAVCIGGGGPVLVEVIVRWPLATTAPPTLTSPAVVGASSTSSIVGILSGGAAASSAASTAMLALLTCDAVPPINTVTYFVSVFFDLGLVAVALGNIGVVIAVGALQLVFVTLVHHRRMTAESISHTHRHPLLVDVYLEDSALCRFPALTVQLMGLLLPGSLLGAFGAILQHQPTTSTVVLCCIAVSCVVLAFALQVVVQRRVALPRAMFVQYTTVAVGTSFEKRFLFPAGRWEPMEVSQAFNPLIASMIPGYSQLLIVEMMLACLLGMVSGAFIGGICDSPLLAIVGALHFTYCVFLVVARPHRLPTDRVCVPVIHLLTGVVCVLRYNDPRDVDGNGVSSALQQLLSFVQVLSSLCTVVFHFCRESALRAGDQLRDDNEEELCCVKEEEGITPLMMVLPERASLDDDEQPRSPPCPAALDDIEDFDEVQTLYWDRDGNAKFPQNQSVTDGAKGSQKEIVHAPSSLAFVYAESTGSTEGYFIGSGGIDGHN

SEQ ID NO: 2767 - protein, 1472 aa, Bodo saltans
MTDMENLQLYFNTLTGTLPDSWSSMTRLQLLLLNSNNLSGTLPSLWSNMPSLQQLRLDDNSFTGTLPATWQSWSGMMYISLRGNSLNGTLPASWSTMTVLSYLYLSYNSFSGSLPSSWSNMIAMQNLNLQSNSLSGSLPSSWSSMTALQTLYLSINRFTGSLPSSWSSMTLMVDLDASVNSLSGTLGASWQSMTQLQTLNLSTNTLTGTLPPSWSAMATMETLYLFSNKLTGSLPSSWSNMTLLVGLQLNANTFSSTLPASWSSMAMLQTLCLHANSFSGSLPPTWSNMTALQTLQLHVNTLTGTLPPEWSSMSKVQVLYLYFNRITGALPGSWRNMSQLLDFQLQFNTFSGSLPDAWSGMTAIRTIAMYSTNLSGTLPSSWSTMTRMGNLQLYKNALTGTLPSSWSSMINLQWLFLHSNSLSGTLPSSWSNMRTLQQLHLESNRLSGTLPSTWRIASMFYLFLHANSFSGTLPASWSNMYNFRNLFLNSNSFSGSLPSSWSNLISMQILYLQSNNLTGSLPSSWSSMTQMTDFQLYSNSFTGTLPNSWSRMTAASVQLGSNCLKGPIPASYALIGGGVKLCNTKVRGTVTNAVLCAGSSWPSYCAGIVSQSATTSPSVAASGSASSTAAAGVSLTISSVSASHSLSYSKTRTPSMSKSATMSSSLTATSVTRSTSISIMSAKTPSLTITTMSESRNHTRSATDTLSKSISLSSRTHIPAHHKRTPSISQSTSLTSLSMFSVAHSRQPQSTTRAFLTLTSVPTTSTSVAVVRALTREQSLSISFTAASRSLSRTHNAPAPSSSKPPASTPSHINTVSTSAVACHVASELVVVALTPMNSAALLSELPSGVVVVVTAASTQSPRNMSNGSTPTVSFDATPVPRLALLSLSPIGLNITLGQSSSAGSSGGLVHWKAANVTHAGLLLNLTTDAPGAAPWSAVVLQPPSGGLNGPTPLLTATVFRVGVTMACDGDAMLQVVVTIPAPGAVRAYAEQVENSGTYSQIVSIAAGGLSTGSALGRMMATRSTVLCDADSAVGGGVVDLDLNICGSAPSESAAATARSAIVSNVVLIGVVACVFLALVVLWAWRTGSGLADAAWIFCLPSSLLPVWTVVVPSTVSSATLLLARVGTSECRGTDVALGVVGLALSLVPCTGVVLVWHAQVSGPVFWECVPRPLRKESPVWVVAALQKALRRAHEWVVCDGPDDGEDTMGAAWVVLLEYRDLPYGAVDAFVLAAVSCVSVVSGLTTSDAQCRGWSLAVVALLVVQLALLVALRPFTTIFSSVYNVVTLVLTILSSLSQLVFVWAYSTDEGGLWLVDASSGLSLTVVGVSAVKMLVDAWQGVVAVRRRLAMLCSEPAPQEAALVRQFSFSYLRSQYSDHDLAENESPMLLDYDIIQLETTSFRGRRQRSARGGKQSAHVNLDSLSVREGEFWDSAGAALGTELTEGISDVLQVGEYTSLKVMVEAMNESENEA

SEQ ID NO: 2768 - protein, 1048 aa, Bodo saltans
MTNLSIVHLYNNSLGGSLPPQWSSLRQLTSLRLDVNSLSGSLPDSWGNMSSLKELYLRRNSVVGTLPNTWGDMIHLTVLALDQGNTLSGTLPSSWENMSSLQELYLSSIQLTGALPSSWGNLSNLVVLALARCNLNGLLPESWGNLWNLTTLTLNNNRLSGSLPSSWQNMSRLASLILSYNDLNGSLPAEWGHGLTSVTRLSLDNNRLNGSLPDSWSNLGSLSILDLTINSLIGTLPGSWANIASLFAVSVANNLCSGQLPDSWGTLHNLYQLYTYNNSFSGSLPNSWGNLTQMTYLSMNSNEFDGTLPASWGQMSNLLWLYLFDCSLTGSLPSSWSGMKNLMVMYLCDNLLTGTLPESWSGLPNVEYMILFNNSLSGPLPTSWANISYLRYLYLYSNSLSGTLPAAWGNMSWLGYLDLDSNCLFGAVPNATTFAPRLVSMNLCGTNLTGGRLTTACANNSTSPSYCVAQPYRHTATPRHSDTMSLSLTSLYSVTRQTVSMSSATVSAAPSSTLSHSITMSNECTVSPSVTINSPSSFKEPDTPPLDITSSRTLHRRHIATNASLSTAYFRPSQSATTQNSFTNEWTSSAAGIVIPAPVVREETEVVVERAGKGLQIVSTVSGGVTSSGSLARMLATTTGGSNSGGLIDFGFLVTCAGDENPSSSVSAARSGVVSNIVLLAIVHAVLLIAAAGWGAVKSLSYIEALAEFCMPSSLMSIWIAVVPTTSDSIVVIMSQLSNSSCLAVDAIILTCGLGILIVPVAALCMLQRKGSSGTLTCNTANAGEPAATIQFTCLAWTRSRIAWATNRTWLWESHSGGAHNNGRSVLKGLAFVVLREFRVLWYPILDSAILVFISIFSALSGDDIGDQRGWMTAILVLLLAQLVVMVVAKPFTTVMSFAYQTISVALSCLSVAFQLAFMFVQLSASTTNTRWLLLAPSVCDLVIISISVVKMLEDVVSLIFAIARRVATVLSKCDTVTPPSSTNFHLQVDSMDEHSMEVGDEEFIFLGERTVEVEELLELNSEEHHPKRETTCHDASVEQLPEFRVDL

SEQ ID NO: 2769 - protein, 163 aa, Bodo saltans
MRGMRAFHVLIFFLCVIGTVVLHVLAGSAQAVVISQDAAVVLSEFFVAVTFNNATPVTVNNACSEWPQHVVCNALSQSIKTLNFTSQQLSGTLPTSLSRFTGLTYFNVADNSIGGTLPPEYSPWGASVYYVSASINALTGSLPPEYHNWTLLNGFDVTSNQLS

SEQ ID NO: 2770 - protein, 1286 aa, Bodo saltans
MQVTRGLLLGVALLSISVLCHAIGAADVPRVTTGATTTSSIATACICSLNITTVLLELYAATNGNQWRQSASWNTSACPSQWYGVSCSSKGLMALVLPNNNLQGALPSSLGNMTSLVTVSLYGNHLTGSLHSSWSLLVNLKILFLHENSLEGTLPASWSTLTKLEQLYLSTNSLSGSLPSEWSAMTQLEQVFVFLNRLTGELPVSWGSMSKLTILNGNENAFSGSLPAAWSGMRAMQQLSFFGNLLTGVLPANWSAMVALKGIYLYENSIGGSLPSEWSSLSQLEILHLHSNNLSGSIPDTWSALSSLTTFSIFSNFHSGTLPMNFGNLTNLETLSLFGNQFTGTLHSSWGSLKNLKILFLHQNSLEGTLPPSWSKLTKLEQLYLSTNSLSGSLPSEWSAMTELQQVFIFLNRLTGELPASWGSMSKLTILNGNENAFSGSLPAAWSGMRAMQQLSFFGNLLTGVLPANWSAMVALKGIYLYENSIAGSLPSEWSALSHLELLYLYSNNLSGSIPVTWSALRNLTTLSIFNNVLTGTLPDAFHALENLQTISLYNNCLTGTLPSSWSSLTNLRVLVVNSNSLMGTLPLSWSSMTLLQQLYLHRNAFVGSLPSDWVRMERLEQLLLSYNYISSSLPEIWKGMKRLTLLGLRQNSLVGSLPHAWGTNLFALQELYLDHNMLDGPLPNEWNQFNNLTMLQLQHNYLSGPMPKEWGDGFTSLAVLNVSDNCLRGSSLASPDFWQRMFPLSVDVCGTRLFIPSQSAAGGEGPVSYAPCDRRLVLWPHQCTTTSTLTVATSAPSETVLTTPSHGSVSSSEPLDAVDTASSLSAAQITAIAIPIALGGAVGALLSSDSSGGDAQVLFATLNSPCVCDGSRSGSLSGRAVSIVMSPLSVFMQNDEADVVAIGTLTGEGNMGIMIGVVGLYLALIFLFARLSANDNDRAVSHSVEAAHDQIQDDASPLLQADGKETTRVSMSNVRLRQFMTSPRAGSLGFPAVPLKVALFLTPGIAWSVAVVLSYEDATPKRTPWNYFVTVLSFIFLISVPWLCEVVMFRRILLRKHWKLVFQAYKSGRFQGGIPVPRSIMWLVATRDGAWGPVARSHIGSPLVTPYNPAHYRYAWAVGHISTTVVTILTTWLPSNQSIGCTSLQVSAASVLGAVSLFFIIAKPHRMLWASMVASFGPALNATIVLLGIMCRYDVVDRNFIFAVSTCGAYISMIGKIIQVAFSEVERRFTKQRVDDAPIIKTPKSITGTDHQSNDLLNRTQSAPTAEVRSEAALSTLVGLICDMT

SEQ ID NO: 2771 - protein, 1093 aa, Bodo saltans
MAHHFFLLLRTMLIVSITLCTSHAATTPMCGCMGQASALMDLYNNSNPSGWTHSDGWGSSNCSIPWYGVTCNGVSIIAIDLYSNNITGTLPASWSSLVSIARLLLYDNPLLSGTLPPEWSSMSLLTWLFIFETNVSGTLPSTWGAMTSMMDLELYGNPMLSGSLPPEWSSMTQLKILIVSATNISGTLPSSWSNMGSMTNLQLFSNPILRGTLPPEWSSMSQLSMLYIFATNISGVLPSSWSNMTSVVYLQLHSNPMLSGTLPSEWSSMSLLTGLYLFDTNVSGTLPCSWNTMTSLRLLALSSNSIGGTLPPSWGNMTNLQQLQISGNRLVGSVPASLLNISSLWQLQLQSNCLTGTMPTITSPLQLLPNAINVCYTKVRGSGPNVSSCPGYQWPEYCNGVVSHTMSESSATISNTASVTRSGQFTSATLSSTSSHSTTSEGRGGTKSESLSAVSTASMSTSLSPPSMTMSSTVTATAPSPSQWVCNVSGGAVLVQLTPPVAMVDEGGPVAFVVSAESSDVVDRAGLVPLVTLTTNSIPRSTLTTRGLRIAMNVSITAPGGVAGRWVVGGVTMSGDALNLTAQSSNTVPWSLIVLRTPVGGWLDASVSLLANEALEFVVKMLCDGAEILEVIITVPAPGVPRVYAEEIATVGRSTQVASAVASVTSGSALGRMMATRSMVLCNADSAVGGGVLDLKLEICGVSGEPRVVARSAIVSNVVFVSVAASALLLLAVLWAALSHTGFPEATAMLCMPASLSPALVAIVPSTASSATLLLARLGASECVALDVVLGIVGLALSMLPAVGFLLLWALRANGWMPTLRDKKAAATFHPLLITMLQRMVRRRWEWTTTDHGRTGMERAWPLLLEYRELRYGALDNGVLLALSIVSVVSGLTGSSAQCRGWSLVALLLLLAQLVVIIIVQPLTTTFSHLYAISTVSLTCLGVLAQLLFVWTVDSLWLVDAAAACSLAVLGLSLLNTALNAVQLVAALRRRIVLLRKLRNKRVLHVSADHDHPSQPFIAASAFAGDKSLSMELDAVRLMAVEDADDELHQLSDDGFFWNSDGAAVGTELVEGHSDIIRTDALLERLKAQSCDR

SEQ ID NO: 2772 - protein, 570 aa, Hammondia hammondi
MICSIMGGWRSERPARPSDRQSNTDRKHVGLVGVASLLVVVADCTIFASGLSSNTKSRESQTLSASTSDNPFQANPEMKAFMERFNLTHHHHSGIYVDLGQDKEVDGTLYREPAGLCPIWGKHIELQQPNRPPYHNDFLEDVPTEKEYKQSGNPLPGGFNLNFVTPSGQRISPFPMELLEQNSNIKASTDLGRCAEFAFKTVAMDKNNKATKYRYPFVYDSMKRLCHILYVSMQLMEGKKYCSVNGEPAGLTWYCFKPRKSVTENHHLIYGSAYVGENPDAFINKCPNQALRGYRFGVWKKGRCLDYTELTDTVIERVESKAQCWVKTFENDGVASDQPRTYPLTSQASWNDWWPLHESDQPHSGGVGRNYGFYYMDTTGEGKCALSDQVPDCLVSDSAAVSYTAAGSLSEETPNFIIPSNPSVTPPTPETALQCTADKFPDSFGACDVQACKRQKTSCVGGQIQSTSVDCTADEQNECGSNTALIAGIAVGGILLLALLGGGGYYFAKRLDRNKGVQAAHHEHEFQSDRGARKKRPSDLMQEAEPSFWDEAEENIEQDGETHVMVEGDY

SEQ ID NO: 2773 - protein, 140 aa, Bodo saltans
MPVLMEFYNATNGLTWVQSNGWGSADCIVSWFGVTCSIIAENGSSVITEVNLTSNNLSGSLTESLVNLTALQFLLLRSNHISGTLPTSWRMFDSLVHLDVSSNNLRGGIPSNWTSIDLRIVDFSRNSFDGRCHLASTLHR

SEQ ID NO: 2774 - protein, 844 aa, Bodo saltans
MLTLDLLSMSLVCIIASDVLMRGAVASSNMCDCAHRFPILMELYHSANGSLWSANSGWGSPATECSQDWYGVDCTGNDVRSVNLAGNNLIGSLPPSWGNLTGLSSLYLHSNQLSGSLPESWGSLSSLQTLTLYNNSIRGSLPLSWGGMAAIIDLHLYANNIEGGLPDDWASLGATLTTLFLFSNKIDGTLPASWHNMTNLKNIQLQLNGLSGSLPSAWSSMSSLEILNLYGNTLTGSLPDAWGNMSNMMAMYVKGNYLSGTLPESWSSLWKITDFQLNYNNLVGTLPSSWSSMTELTLLTMHYNSLTGTLPSSWGHTMVKLTRLSLQNNQLNGTIPESWVTGMTALRQLYLSFNELSGTIPSVSWSAMTNLATLHIESNQLVGTLPPSLGALGATSMLKQLFLQDNCLSGMIATGSYSTFAAVAVSSDADGMNTCSTRLRRTPSTVSVCGGDAKSTWPAFCFWIVSRSSSITTATSSLTRNVSKSVSGSQSRRRNTDTASISTSSSTSSSASGSRTTTPSSSSTSTPPTSTSTHDSSATTHDSSGTAMSLSFSHSWPQSQTVNTHTKSTTSGRDKSMTSSQWHSTTSPSDLEATTPHSTTASTTSLLNSSHTLAMPTLTCFPNLGSTVTMSLATTTSLTHDGSGDEVVALISSVNIFQHTIANSDGGVPLSVEFTALPVARATLVDLPKFVLNISKHDRFSTMSSTMFWRTSGVVHVASSLLSTNLNWSTVEVGESTTTEEVEGGEGGASWQVLRVSPPTSGWLDAATTSPVLDRTVSLVVTMACAASDQAVNNTVARISISIPAPGVARQLASEVKAAGGYSQKKKSVCGGDAKSTWPAFCFW

SEQ ID NO: 2775 - protein, 377 aa, Bodo saltans
HASVFVRVLHVPGKGQQQQRLSQGKSNTALGRWFASLSRRRLGFVMRLRFPNFSVSLVLLLIPGIVRAVTTVIQDITGNVNGGPAGLDTAAVTIGVVFVVCGAACVETCVYRHIDSALVTKASTQQRNDADGYSPMIQFVIHQRSPQLFAPIPRRISRILLPRGRWEPEFARKTYAGIVAALSSQWRRLWCFLPTINILVQILGSIGGSDTVCDAVQSLTMIVLACACVFFAVARPHRALLASYLTCVSLLLSCVVTLLAMLCRLGSVDRSVVDGFGVFVSVAMMIMKAYHVALPHVEGWLIDRSRNLNGATVLSKQNNVDQSPLLDIVIRSTPSGRDVDALSYHSRGNPEVTLATPQSTMHAEVMLRRLIAIICDN

SEQ ID NO: 2776 - protein, 803 aa, Bodo saltans
MSTVSNLTHTFVARTTHLAHLIVLLVMVSALLHAQELDRAALVAFYSDTNGPTTWNSSIRWATANSSANSCNWYGVTCGSGGRVTKIVLRNAGLSGTLPALLGTIKKLNNIDLQSNRLSGTVPKDLVNCTDLIELHLQVNRLSGTFPPEFSSLSQLSIFHMSNNSFYGTLPSSYQSLTQLTSFEVDQNELTGTLPPEYSAWRGIQSFYADRNGFTGSLPPEYSAWTSIVTFRAFINPLTGTLPESYGSSWTNAVSVYIYTTNISGSIPNEWAGMTSLYELQIFNNKLTGTIPASFGNFTNLYYINLSFNNLTGEVPWAVWSKLRGVDVFGFQDNPFLSGTIPVNFTDVLVPLFSMVSVCRTRICGPTLPALFLGYGCVPPSFVSSLGLLTQAAMTQMVQIATYEPSFSCETPQPTLPPRARDATRTALAVPPAPHSEHAASLTTSGPTVTASVVVVSQLISGAAASTGGLHAMQALMRIQRLRALCVAQNQLSSSSFSTSSSGVDDDSSSSGCCDELTNPLQLTIDVNGNSVGEKEAGALIGNTIALVVFGLLRIVGNWSIRQFKKQHRTADFAKTEDSTIFSHVMTALSSCFSSKHISAIWPAYTLLICPTVGVCCMLLQVGNSDGLFVAVALLALWTIPCIGANVGLAYNEHLQKATRSFALCSVNTHETTLRSSVPSTAWKRMKDFLLHPTEELEFSNHAVAKAIEHAYGAVLFGFRSSRLWYFNVELFFGIATGVLIGVTLSSSDPCSINTIGWIMAAVGLLEGASAFCIRPYCAAVDFVVLAVVNGLSVVSQMSRLWF

SEQ ID NO: 2777 - protein, 837 aa, Bodo saltans
TQLHKFDISSNKFSGTLPASLSNFTHLLQFDVSDNNLSGTLPPEFAQWTGLQILNASYNNISGELSSDFAALTQLHKFDISSNKFSGTLPACFSNWTRLSLFDVSFNRVTGTLPPEYGKMKAINYFFVSNNLLSGTLPSNYSLWSGLLRFKVGFNNFTGTLPEAYSSWSGAFEIVFENNSFAGTLPVSYSSWIKMDSFSAQYNSIGGGLPDAYGSWSAIRIFSMERNQLSGTLPSNYTHWKGMMRFRASWNNLSGTLPAWNMPNLTLFFVSGNSLSGNVGNYFISQMPALISFAISHNNFSGSLPPWPLMTALDAQNNTQLSGGLEMPSLYIASTCATRLCSVKPFFAKCFPSGGMEEYAPELTNYTSLSTKYVTNVPSCASTPPSTVTTASPHSAGAANDSISTPLSASFSLKATASIATVAAGASAVSGADPTDAQMLVSILTSPCTCTAATAPIDASSTWQLALSPFSFLGLSWVAIGNSLLCCVFLCAHSACVWFLVRARRGRSRHQTATSAHTTFVGSWLARNDPRRSVLAQLRFPNLTVSLVLLLNPGIVRAVTSVIAATVSTSNDDGLVAVASIYGVTVVGCSLAALELVVYRHIRAELSAHCEHRNERTQQCRDRIQFVKHHDVSSWASSCRAFPLVVRVLLPAGMWSPDRARKSYGGIVSAFSGRKHRAWCVLPLTNLVLQILNGFGESSTTCNALQSLTMIVLACVATFFAVVKPHRALLASYLTCASLLLSCVVTLLAMLCRLGSIDRSAVDGFGVFASVAMMMMKAYHIALPWVEAWLMARNEAGNAVDLSLPSHEDIPLRRKDQRQALRDLIELITSQARRCVR

SEQ ID NO: 2778 - protein, 1220 aa, Bodo saltans
MRMSNGRSCVHALLASLLVATVNSGAFCGCEDDFDTLMEFYNSTDGPNWKKNNGWGVKDPCQMDWYGLSCDDVLGVVGAIDLTSNNLAGTIPDSFANLTSLTSLRLTHNSLNGTLSAQWANMTSLTTLALDQNRFTGALPPEWGSLSELQSLNLQSNRLSGSLPPEWHGLDRLVTLALDRNMFTGNLPADWGLMVALQTLDVQSNQLSGSLPPEWNGLGFLITSMYLNDNSLEGTLPDVWGDFLSGLTRFCANKNLLSGALPESWGAIDALQELQLEDNRFSGELPSEWHALLELETLSLARNYLNGSLPESWGRIRSLTVLNLRSNFFSGTLPDAWKTFRSLQSLFLDDNQLTGSLPSSWSEMKSLMILSLRGNFLVGDLPANWSAIPSLASIDLGENQLTGGLPASWATMPSLSLLDVSNNQLGGVLPSVWSDSGGPHTLNLSHNQLSGTFPDNLTKVLFLEVVDLSSNRLSGPLPAGWITFTHLTNLALDDNDFSGTLPDSWASFTALGTLSLARNQLTGTLPTIWNLWGLAAVFGSCVFRTLILSGNSLSGTLPSTWSLMSCMSLLMLDHNQLSGTLPASWSSIGSNLHGIEIILDHNMFEGELPGAWGPLASRANTFSVVGCGLSGMLPEQWLSVVGIRRLLLSENSFRGAIPSAWAILGDVEIINVSNNCLDGVNPWLHIVQENEGIVDTCNTHILPSSLSCQHHPSVWPQRCNANRTTRSATLFRTFSDELDHQARASSPSQTLHDAHHIRQTSQVTLMHRTSTSTLVEPLSNLPLPLPTVTVAAVAASAPLAATAVVGAVSSADPGSAQALLTTLQSPCAGPNAQQSTPRASSLALSPLVLFGDEGTIGAFEVVVGNTGISVAIMFLHFMATRLLLYYHDDEERVNEVTHSDSFLKRVACSTAGARLRFPSLSLKFVAFLMPGVVWAMSSLLSDADTMDAAVVGIGVVVVFGALGAFWYSHHFVLHRWILASEEVEEKKGHGLLFVRFRNAGPFSPPIPKALASIICSRDGQWGPRDRRAAFGSPMASVFLPDHVRWIWMVSPGVSLIAVGLSTARPPTEHDGPACDAIQSVLVVLFLSTSLLFAWLRPHRSMLRSLLCSFSSAHNGLVVILAMLFRHHVVEQNVMFVAASGGAYVSLAVTILVLGIEILENRILGTSLEAQQANSIRCTWSEAKVVPTITQKRKVSQRAALEFLLRLACSSAADTKIPEYL

SEQ ID NO: 2779 - protein, 890 aa, Bodo saltans
MTTMTTFYAHTNRFTGSLPPQYGAWTMLTQIDVSFNMLTGTLPDDYRLWAGIQDIVVKSNMLTGVVPVTWGEPSFANLRLLNVEDTCLKGWLPAVLSSVATLKICNTHIIERTNCATSGGSWPAFCPNETKTVSLSSSMTGTEGSHSLKAGSETASRSAHTHLISRSAHTRTISRSAPTRTTSRNAYTPTAPMSVSLLRCTPYESTANVAVTLTAPLATLPPRSTASSLAVALSSLMPVETNVSFVPSSLLPSPPPPPLVVITTTPIARSTLVQAPEFVFNLSFTAPANAVRWTVTNVVYQTTPAGSTPNDNNVTLDWSSSSTVANQASTVTSTVLAVQPPKETGVWLLSNAGVLVGQTLSLRIAFACGGEEVLVVELQIPAPGYPQQLASQVEAATRYAQVASALAGGASSGTALGRVMAIRSMVVCDADASVGGGVLDFGIQLCPSSAETDVARSAVVSNVVALACVFVFLLLLSCVWAHARGVSLRSALLVFSMPSSAYPACVAVLPSTSAAIALLIARVNSSTCVGLDAVLIGLGLIVAVGCECALTAVWMTGHCGDNTIHNVPRWECRQRPRHLPANDARLISLYARVFQPFAAVVLHRAWKWHATLRSSRVPLKRAWAVLLEYRVLWFATLDSGMLVVVAVLAVVGGLEGTDSSLCRSVVSVVLVLMVCQLLLMMLLRPYTTLFSAVHGVVTLALTCLSIAAQIAFIVTLRSESPHLWLVNASAGCNLAVVGVTAVKMMFDAKDVLDAIRRRLNGTLEADDENDDRPTTLVVVNVCDDDDEMSYAAVATHVLGATPFVDDDRDVPCSTMKRGDEMLVVNPGATVNNKRLTSTSSHGSASKSPLSPKVARIQSVGDALELSSSSFELERANAQFWDASGTARVLK

SEQ ID NO: 2780 - protein, 98 aa, Bodo saltans
MILGGIYFLACVLTAYALGQPTVNRTAERAALVALYDAVDGTSWLVSTHWMSASVDHCSGWFGVTCSETESAVIKIVLNLRGTLPCVHKATTDVFELE

SEQ ID NO: 2781 - protein, 1542 aa, Bodo saltans
  misc_feature (1289)..(1389): Xaa can be any naturally occurring amino acid
MMDLVLTLSVILITLTKTSGATCACTQMASAIQAFYTATTGASWRRPWDMSSADVPCGLEGVTCDAAVSDITEISVPSRGLRGTLPTELGQLTAMKSFIVANNSLSGTVPLELLSCIALDHFDASVNSLSGTLPPEFRAWRKISFFSVATNHLTGTLPEAYSAWGASLVTFYADRNSISGTLPGAFSSWTALKVFFALSNSISGTLPPEYHSWASITDFRIQGNSLTGALPMQYGALFNLIYFDCSINLLTGSLPEAFASLVMLEKFFTAGNSLSGTLPPGYGAWKRLTGVSFTNNAISGTIPAAYSTWTAITLFQLGSNSLTGSLPAEYRSWLSLSDFRVDVNSLTGTLPAAYSSWTSITVFHLSSNSLTGSLPPEYQSWASITDFRVDVNSLTGTLPSEYAQWTRVELVNLEGNAISGTLPASYASWKALTLFRLSANSISGTLPPEYQSWASVSDFRADVNSLAGTLPAAYSSWTSITVFHLSSNSLSGSLPPEYQSWTSITDFRVDVNSLTGTLPGQYAALVNLTYVDCSINLLTGSLPEAFSSLVKLEMFFVTFNSLSGTLPPGYGAWKHLSDVSFGANAISGTLPSEYAQWTRVELVNLEGNAISGTLPASYASWKALTLFRLSSNSISGTLPPEYQSWASVTEFRVDSNLLTGTLPIAYGALTNLTTFDCSGNFLDGVLPEFYGGALAQLQIFSVANNSLSGNLPPSYGAWTHLRTVSFALNAFSGTLPIEYAQWTHLQTFDVSSNAIFGTLPPTFFSWIELNIFQVFSNAISGTLPSEYSSMTNLSNFDCSSNFLTGSIPQAYSSLVKLNGFNVGNNSLAGTLPPQLSAWTRIALIAVNINNFSGSLPAHFGAWANTIKSISCASNSMSGTIPASYGNMASLTTLDLSSNHLSGTIPLALMMCPQLQILSLGNNELSGTVPADCSASLLVLSLQGNAALSGSVPLRLVSLFAIVSVCGTEVCPTSALPSQVCVPEGVAFDGTPSTTEILSLISLYKSQCTTAQRVSPAQLLSATRTQLRETDHSSLPAVTSALVATTVYCSIVSGTLGRGAVASLQRSGTVLRLAALCDASQDGSSASGPMFSDLDENPLGAAVPVDSAPLEYGAGAAVVNALVVCSVGAMLHALHTAQHLATSPSAPSPLPRLLMTLLGVLPSSRLPGSLSTAYGTLMQPSVQACVALLVSTARSVASCVCGVVMLCVWLAFPAYCVHAVVMGGYHKDGVFVLESIKRQNSFGHERNKHRSAPPCLRVLRRLQVCLTAPRGEWTVRRATAGSGRRREEQXXXXXXXXXXXXXXXXXXXXXXXXXXXXXXXXXXXXXXXXXXXXXXXXXXXXXXXXXXXXXXXXXXXXXXXXXXXXXXXXXXXXXXXXXXXXXXXXXXXXXMWSAGVALVLGVAEVALSVVLRPFGVRLEMYATVAVVALGVVGNALVLGGEPAAAGVVVSAAAVLELVTMVVLMLSGLEHSCTESCSRDPPTEDSYVRAAELEDGTAALNRRSQRRIAVGATSKTSTKDTDATQRERLAALVRVICEAQVPPV

SEQ ID NO: 2782 - protein, 236 aa, Bodo saltans
MIIVFLCFLVLSPSVVDAQCTCEGSRQTLVDFYTALGGAKWKQTWPVTDASSSVCNFYGVTCTSGDITGIDLDRNWLRGTLPASLSSLTRLQSFSVVYNGVMGTMPAAWGAALSSLTSLNLQDNLMTGSLPSELAGWTSITYVNIYNNSFSGTFPSQLSAWTTLQTIYLGYNDFSGTFPPELSAWSSIQTFSCSGNSFTGQLPSSWSSWSKLQSFRLSESLIGGTIPSSFSAWSLV

SEQ ID NO: 2783 - protein, 146 aa, Bodo saltans
MYVSSVFMVIIVSLICEVELLAGTLVGSTKFISERDALMIIFNATGRPFWRHYQWNVTDNVSLHCLWSGVHCTNMSRSVVQIILPNGNLSGSLPDVFDALQLLQYLNVSGNSLAGSLASCVLLREFDISRNMFSGTLSRSFQLAVY

SEQ ID NO: 2784 - protein, 147 aa, Bodo saltans
MNSISGSITAEFSNWTSLVDFKAYDNALNGTLPPQLGHNWSMIAYFEVHFSQLTGTLPLAYAEWRAIRDFHAAGNLLVGSLPGDYAKWGTSVLIVDYSYNDFNGSLPREYADWTSLNAFYVEHNHLTGSLPLEYAAWASMKKNVCVK

SEQ ID NO: 2785 - protein, 515 aa, Bodo saltans
MLNTYIRNHVVTIATIIVFTAAFFVAISSTVAAQCPCAHRMPILQELYDATNGGLWRRPWNMSQTDAPCSFEGVTCGSTCDITALTVSGRGLSGTLPAALRGLVALEIFSASKNNLTGTLPAELSLCSKMTTFNVSSNALRGSIPGSFSNWTLMQKFDVGFNTLTGTLPTQLSVWAQLSQFLIAYNSFVGTLPPEFSSWPSMVWFHAANNNLTGTIPSSLASWTEVQIFDGSNNRLSGPLPMELRMWTLLRGFYIGSNSFVGTLAEDFRSWVRLEAFYASNNNFTGTLPVSYSNWTSMTEFSVGYNQLTGSLPAAYAQWTKIVTFGVSGNAQLSSTLPREYSAWVSIKQFSAANARLQGTLPPEYSAWTNTFVFSLNGNQLTGTIPPEYASWSSLAYFYVASNQLTGTMPASLDQWTRLNQFVVHNNSLSDTLPASYSMWSGVAFISLHTNQLEGTIPAAWPSSMLNLSDFRVANNSLTGTVPAAFGKLPSLTVFSISSNAFSGMLPDFSSSSLI

SEQ ID NO: 2786 - protein, 1525 aa, Bodo saltans
MTTLSSMLILFVIVVQHHQIAVQAQCPCNTTANWQFMSDFFSATGSNWQPAVTKSESICDWAVSSKIVCNGTSLAGIDLRNRNLQGSLNNLNFLAAFRNLSGLLLFDVRDNNLLQGNVTSMTFPVSLQTIRLPQLFLGSSLPEGLPNLEEWTCVGCTGMQGSLPSSWCGSKRNLQIVQLGSSAISGTIPPSWSSCPINTLDLSNTNITGEISSVWFSSASPFLQTLKLSNCQLNGTLPNNVTAPQLVSVDLSNNFFSGPLPDDLGAKLVVFQAPSNAFTGTLPNSLPPNMLTLDVSNNTGITGTIPRGWGAGLVETDELPQFFRTIHTLSLGGCSLNGSLPRLWLSSPWMESLQVVNVSGNDLSGTIAANISVPFLSTLDLSSNRFSGTLPLQLNTTFLGIVNISFNVFSGSLFTTVPTTLQILDASNNNLSGKLMFWDASFTVLNISHNMLNNTLPSPWLGVSQTVDISLNNITGALPSATVIAILYASSNRLTLPAPTKAGTSSFTYIDLRNNGITGPLTSNENFTNLQTLDISHNLITSMDGTTLQRMPRVTQILASHNRIVKLPSYLPDNTQLLDVSFNSVVGLMPGLWTWVYALKLVNLSYNVMNSTLVPKQLCRRLMGPQLIVFPGGNSLYPQISIHLTNASVKFSHSNVFQQLKDDKASSDWIRSWCQSSSVSHVLTASEVLTPSNLPPRTPTLTKKATRSLTASIARMSHSIDPSPTRRSISRSSSVVVSHSHRTLTRSHDVTPSLEIWSLSSSMTMLTTESDSLTAPLSKSSSRTVRPTGSLGSPSSSRTRESSVTDSVTLSLTTPRTSTPTLLNTTSLALLSETQSLTVLASRRSASLSSTFFCGAAVGILANSSKVASLYDVFTKAPMTLSMSWTGGQWGQSAHVLSATTSWGSVQIISTALINTTVRTTLALSAPTALETLLSDVAVDISVALMWEPDGGIVCSCPATTVHVLLVASIPSTSSELQTGANVVSSVAAPLASAAASIQVSLLQLQLSFCEFSDAASLSIAESPTRLQFGATLGAPFRGGIIGNELLMVAALILGHIVSAAHHVLRRTETVFFSQALLRLPGRCFVVFAFLLQPTIACGVALLKMPTASVGDYVLGVFALVSQTGVIAYTLWRTSTFIPFLKPLRNAPQGWLDVLVGRRTYWVASSGERDQQLHEAKEEEEASLVIPRHAPLYKKFGVRLPSLPVTRLNDSDDDEDDEELRGPARVAFLEANRYEYLTGRTAPKRHWYFAVDFLYSVAFGVISGLRPSTPDGCFNAQVGLTVVSALQFALVLLLRPFSSHTDVFFVAMISFMSAGAGVCMIVGAPIGSDVLSYVQLCTVLLRSGLRIVYVFLNGGAWWMIWDDNAVDANKDSREEDGPTLDDLSSQLHMPSSSFNVTDADMVGSLLGPTGAVNSLMISSFIDEEEVKHDMTAADEDVVKKKAHKNRPASPETPIRPVINMTTSEMLDAIISDRIHRGSDALAAPVTHFTARNRLKNAVLLILRKTEEVKCPPSTPHSSAVASKGD

SEQ ID NO: 2787 - protein, 139 aa, Bodo saltans
MEFNSGSKTRDRLSGTLPDTFRNAPSMQSFLFCFQFVNGTVSDEMIASWPNIQEVRLINNSLSGTIPPSLTTRVSLELLELQSNYFTGTIPRFNAPLVNLTLINIEHNKGLSGSFPDSIVINPALQMVALNNIGQLQGT

SEQ ID NO: 2788 - protein, 840 aa, Bodo saltans
MSKLQWLTINSNRLSGPLPESWGTMTKFTRLTIFSNSLNGTLPASWDTMSGLQTLTMSNNSLSGTLPPSWGNMPILQTLSLDSNSLNGTLPDSWATMPKLQALNIDSNSLGGTLPSSWGTMPSLATLSLNVNSLSGTLPASWNSISLTALSLGSNIFNGTLPASWSSMFRLTSLALNFNDLNGTLPASWNSMWDLQTLYLNSNSLSGTLPASWDSMFSLASLALNFNSLNGTLPASWSTMSRLTTLSLASNSLSGSLPASWGGMSRLQTLDISSNALEGTIPAQWSQMGYQMVSANQSLRVRLNLSVSFLNGSVPASFAQNNGSKPCLNIFSTHISSKFSSRNVWNCNWSSFYNIAVPTSSHTLSPPASFSTTADRSDAEISTTNVTSSSSSISATVPLVVGIRSPPAITVKSLAQIASGVGAALAVIAAAPSNGFAINRLATLSNLGDCSDAVRQTVEGVMTDGIPTLLDAPLQLSFGDEFGASQRGSVLGNLLVLIIVGFVSVGAVVVHRCVNGIRPRAILSHRGLFLKSAATLRLPGSMVISVVLLLDVLVTSSVLLVSYGVHVSDAVLGVAALLVVSVVFFGTCFVLDPRTLSFQAVALHVRQIAICDKLVPTQSVRVRIAALWDHITSPSNEWETRKLQRKGNPLFVEHYGHLFEGCRGGRHWWILVEASTTIIVSMLRSVVPETEAACVTRAWIALALVSVVLVALIAAWPMNTHVETGASIALSGAQVVVIACAIGGVGDVADVIGLTVSISSAALALLPIALWMTSFLSWECRNKKTPHSVVPCEMRPLSLTQMLHKIKSTHSVVSNCSELDTTTVALRVIIELICDLSHFE

SEQ ID NO: 2789 - protein, 1382 aa, Bodo saltans
MGSLLTASSVRSRPHFTDRTVGLVIIFLVGLYVSGAVASEVNTSSVSRAVSSVTASRAFSGTLTRRSSSWSATLSVSHSLSSTRSKKNSSLSHSGSNSATVPTVTPSTFSHSLSLSLATSLSNSTTLRMSFTISRTTSNSKSESYSATTSVTKSLSATFTHTWLSLTSSLTFSTSLARPAWSLSTSTSLSFHQSVTPSQSRSLSTSGSTITASYSLSKSTIVGSPSGSFSQSHSTTMSLASTTSTLSWSPNSNSPSMSSLSESVSRTASLTHSSSTSPSASWSPSLRSITQSNAVSTTSTYSATSTATNTVTKSSTYSLTSSASLTPSWSRSLSFRQSSSSSTSYSLSQSHSITYSMTLAPTVTVSASISRRSSSSTGSVSLSVSRSISFSISGTWSTTITATPSHSQLQSHSVTTTQSPHSGTLSSTYSSSSSMSISPSATNTTTTSITSSLSSSVSSSFTPPLLNDTQRVSDGLKQPKRVCKYFAFSLNANLQKHLTIRLWNTDSFHVSHNNEHISVSRTATLSSSSTIHNTLTPTPTKSYSESSSQSRTFTRSSTLSASQSPSITSSLSVGSLSATSSRLPTETWSRSASGTLSVSATVSASVSASLSTTTSYSSTITASPPTSVTATNSPTKSPSISTTLTNSSSPSPTSSASWSIPPSASQTRSASTTTSRSEPPSASASNTLSRTVTLSVSSSASHRISISSSTTNTQSTSRSLSTSTSLSQSPSHSLSPSCTASVSSSASVSRSTSTSPATTASPTPQDTRSPTVSMSPTSTWSTSLTSSTTASSTASSTMSPSLSTSTSTSLSMSPTHTNSTTPSVTNSFSPSFSTTSNVSSSPTPTASPTASLTFSPSDSDSTSRSTSPSSTVSASNSDSSSLSPTASLSPTASASVSLSGSDSRTTTPTLTASLSASTTATMTLSSTPSRTITVSQSTSLTPSSTASPSATDSHSPSVSLSPSASTSGSPSASPTTTLSSSISSTASASYSGSPSTSVTPSSTASPSVSTSGSATASVSSSTTGTPTRSMTSSMTASGTLSLSPSASVTSSPSPSRSASPTQSGSSTPTSSASATVSASPTASVSPTISRSVTSSLSMTASASLSRTSTWSPTVSHSPTTTSSLSPSTTNTVSTSGTLSATSTMSASVTATITPPPTPTPTYSASLTSSCEWTESVSLTLSTTASISLTRSGSLSTSYSSSTSRSRTGSQSPSATSTATVSATSSLSATRSATLSATSSTSLTYTASLTRTATGSASGTLSLSLSTTRSLTATATATPTHSQTASMTVSGTRSATESATLTASATESATVSASSTSTWSATATSSRTTTASASPSLTPSPSEQLSESTSGSSSPSVTTSASSTASKSNSATLSTSLSKTLSV

SEQ ID NO: 2790 - protein, 164 aa, Bodo saltans
MTGICGVAVLVVLITAAHFPPVSADFSKAGQLLAMQRFYDALGGPSWNPNCAIGWDRRGTEYCGLAGVGCLVNSSNGGFDIITSLYFFGCNLAGTLPVELLDLRGLLIFDIIANLKVTGSIPAGYGTAWPQLTRLAIGSTAMHGSLQTETGYLRQLEILILNGT

SEQ ID NO: 2791 - protein, 544 aa, Bodo saltans
MSYGLAASPFLSSVRVFVVNSNQLSGTLPSQYSFWGSTFASFQANDNDITGTLPEAYKNWTSLNRFDVSSNQLTGTLPSAWSNCTSLEVLDLSNNRLSGTFPAKIFLKRLPQLRVLDIHNNIFDGSIPVALIAWWPKLTDFRAESNLFSGNISSIDDDIVTAFNTIHNWTCSLQVFIITFNKGVFGPLPASFSSCRNMTTFQALNLSLTGTLPAAYGEAWANTITSFNVRFSNLVGTIPDSFAKWTKLILFDVGANNLTRNVSAVMQNWRLLETLRLANNQFFGTIPQTLINNSNLIQLYLHYNRFVGTVDSQLGPGCPSMFHFYVQGNLLTGTLPNSFSAWRNIQRFFVHNNSFHGTLPSSWADWGPSIQQVNLGNNQFNGSLPPRWYLWSNVSSVSAIVNQLTGELPESWGNWSPAGSLTLDRNSLSGTLPNSWGSLPAMSALGVSDNQLSGPLPFTWSAMKKIFFLGLQGNQNLSGSLVFPPNSSFKLVTICRTGLNITSSPTIMSCCLPQDADLTYLYETSSEALSYCGNVVASPSPDQP

SEQ ID NO: 2792 - protein, 1002 aa, Bodo saltans
MLFVLCAVTVMIVDKMHYANALTNQQLLQLFNDATGGASWFTQWSGSNMCTWKGVTCNNNSGTEVRGLSLVSNNLRGDFPNDILRNLTSLRTLQLGGNNLTGSLTADLATLTQMQTFDVSSNSIRGTLPSELGAAWPALAVFRVFSNQLNGSLPPAYSSWLSLSEFFVYSNYLTGSFPDSYGGWSLLTVVKCQDNNLSGTLPASFKQWTRLLFFGVARNQLSGTLPQEYASWVKLTTFDISTNSVTGSLPDNYSAWNALDYLNVAENSLSGTLPVAYQHWTVLTNFIIAGNSISGALPEEYGAWGAQMSFYAHRNNLSGSLPSVYSNWTALSEFTVYSNMLTGSVPASYSNWSLMSYFKVDKNNLNGTLSASFSRWTALQTFTIANNHFSGTLPDEYGSWGSQMTECVVDGNLLTGSLPSTYGAWTSLVNFSAGDNHLSGTIPSSYAEWTSLQFLYLSGNSLEGTLPLFIAEYWRSIRVLDFGRNLFSGTIPASYSLLNASIEALYLQCNQLFGSLPDTLGAMSMLNTLLFSGNRNINGILPSAWGGPSSSLKLNALGLQNTSVSGTIPLSWSTTIQATGSVALCYTNLCGGAGGLALTFSFCVDDVATCNPTNQTFLLAHATLYSLTSLRSCSETTQSPSSPPSSSTQTPTSSPASPSINLSTTTAQQTAVVIATAPVGILTALAGSATLSVGVVRAGASTRLLSCGDGVDLDALAGGYIAAYSVLCSAALCLMLWRWHTHAARWSKACEHLGMPGQLWVVLSSVVFPLVEFGLSLVLLHNGGEVLGAVSFSMGMLSVTWLFSIMTLRFRAVWRVSRAGGTASATSNALSTWIMSRFKEYDSQRVGRWMDTMNSSTSSFVECNGAVFEEYGCRRTWFVLWENGVAAILSVLSTVSRLSSSACSITQVVGAGAVFEEYGCRRTWFVLWENGAAASAVCGIATVIECMQYHPSCGCRVADVLPPCACHGASTSQGEGSAVSRCDGSVWFRWRAVSAGLCDDFH

SEQ ID NO: 2793 - protein, 994 aa, Bodo saltans
MMRCRCVAVRLFLLFLCSCLLPCPRCFLADGAALQAEVDIVALFFTTTGFRNTTPVTLTNICSEWPLMIICISNRVSSFYFGSANLFGTLPTGLSGLVFLNLLTVSDNQLTGSIPSDLCRSGKMMNVQMGGNLFSGSLPPELSNCTLMRTFNVSYNNLSGTIPAAYSAWGASISTFEVTSNLLTGTLPPEFSSWTMVFYFLVNSNQLSGTLPPEYSSMEAVAHFDVDTNRFTGTLPQVYQQLHALEAFSCNNNFLSGTLPSAFASWVQVSFFQVDSNFLTGTLPREYAAWRQIHYFDVGNNSFTGSLPPEYANWTQITSFYVSNNFLSGTLPPQYGNGWKGINLMAIQNNNISGSLPAEYSALVTMSAFNVALNLMSGTLPPQYQAWSKMSKLSLYGNAFAGSIPLSWGTGMTRLGALLAFNNMLSGTIPLMNSPLLITLAISFNDFSGTLPAASSWPSLTTLDVQNNSKLVGPIFSPSTMPFLISSCGTELCLSSPDFFLVQVCLPSGAIAATIMTTDSTAILTLARTYSYSTESCAAATTLVPTLSPPPSSSSLAAVNQSTASDYQKTTVGAVATTAVLGATLAAVDSADAQMLVSVLGSPCVCSTTLPVQQREGSVLLLALSPFSPLGSAWAAIGNSLLCLMLVGSHAALAILPARHRCGRRSTTRCLTKAPHCNTLLGRFLHDSIKCERRRLFARLRFPNLSVALLMLLLPGVVRALASVAGVVSSQSQSSDSLEIAAFPIGVVFALFVGYVIEVLTYRHVDAEASKSSPLSQRGNATLRFSLHSPPLLVSKIVPAAVSAVALPRGVWEPFRSRVSYGGVVSAYVSEWRRAWIVLPLANVIVQILNGISGGDAVCDALQTVTLCVLAGVCAFIAYARPHRALLASYLVCASLVLTMVTALLGLLCRHGAVSPDAVSGFGVFASVAMFVFKLYHVLMPIAERRLMGRNEDSGAFTDENATLALPVQMRHQSDALRELLEMAIAVVRDRTLE

SEQ ID NO: 2794 - protein, 893 aa, Bodo saltans
MGTQFWLLLIVATLVASVANALDISQVESLQQFYTATGGASWLRNDGWTTPFALWKNPCNATVPTPRLYGVTCGAGEVQVLILSTNNLVGTIPATFFLNFPTLSTVQLQSNPLLTGAIPDFPQGSTLSNLLLQQCSFSGTIPSSVFTPTLIQLQVEINQLTGGVPSNVGTSTQLSILEIGQNKLNIGAFPASLVNCTALTLLSVMNSGVTQLPADLDRLQVLSTLNLQGNDLTGSIPEAWCNIRSLTSLFLQDNNGLSGSLPDCIGNWTQLIHLVIENTRMTGSIPTVVFTAFPELQQLALSGSMFSGTIPDLFANIPKLQHAEFNGNNQNWNQVYSGAFPESLLELENLQTLSIQYTNLLGPTKAYPFSRLTQIQSLTLATNPKMVMVFPTEILTDLWSTPSYVEGTQRALLISNLPLTGTLPNIPEQIANMSTVGGLSFAQTDITGYIPNSTFLWVPEDSRKGLLAHCTKLLAPIAPWMLPLTNNFQGMQFSLSGAYNGVSTFSMTGGDELGIVGQNFVNIPNRLFCGFCVSGNTDLCTGDIQSLPPQQLNTNLVFTSANQSLPGVMFCQTPAVPYNYSIQVYLFYVGPAYGDDTEHYRVSSGGVTIQYYNPTPLLYDIVPNHGRIEGCSTIYAVGSGFLNAPNMTLRIAGSIWAAHGVVMNDSFVQFVIPSANASSINTQYPFPINTSLEVDLFPAGGNTPGQIANSNATYAFEVTCNTPLVLCAHGFQDPELCPVAPLCRCFSEGTCAWGNTSWFTSSSSFGSPEASNFAFQCQCVGGFTGAACEQCKPGYYGPSCSKCTCVHGACLDGMSRDGSCDCDSAYLGGTCTISKLGLGVGIPAGLVVAGLVAFCIKRRFRRHGDEYGAVGMNTEIREKSTGGYGGAGGKLLP

SEQ ID NO: 2795 - protein, 1323 aa, Bodo saltans
MHLYRALLLATMIVITLITRTTLAVGMCGCEHRYNLLMDLYNATNGSNWVNNSGWGGGGNCSVGWYGVTCGSGSPVDVTQVTLSNNNLRGTLPASWFNMSALKTLYLNGNGLVGPLPASWGNMSALTDLQLFQNSLTGTLPSSWGGMSGLIILLMFTNSLTGTLPDVWNAMAALQNVQIGTNSLNGTLPASWGNMTALQILYLNTNALTGTLPPSWASLTNLQSLYLSTNSLTGTLPDTWSAMRSLQNMLIDVNSLNGTLPSSWGNMTALQILYLNTNALTGTLPPSWASLTNWGNMTALQILYLNTNALTGTLPPSWAALTNLQSLYLYTNSLTGTLPDAWSAMRSLQNVQISVNSFTGTLPPSWGNMTALTTVRLNQNALTGTLPASWVSMSNLQNLYLYTNTLNGSLPSSWGNMTRLQILQLYTNSLNGSLPSSWSGMSSLQLLYVNSNRLIGTLPDAYSNLSRLTNISLNTNFLSGTLPSSWGNISSLLNLQLGANTFTGTLPAAWSNLRSLSYLAIQSNSLSGSMPPSWTSMSNLQSLYLNTNNLNGSLPESWGNMSSLQTMNLYSNNLVGTLPTSWNHMSSMQALLLYTNSLTGSLPDVWSAMRVLQNLQLFSNSLNGTLPSSWGSMTALQILYLNTNALTGTLPNSWASLTNLQSLYLHTNSLTGTLPDTWNGMRSLQNMQISGNSLTGSLPSSWGNMTALTTVRLNQNAFTGTLPSQWAGMINLQNFYVYTNSLTGTLPSSWSGMTKLQILTLYTNKLTGALPEAWNGMAALQNVQIGGNFLNGTLPASWGNMTALTVVLFNENALIGTLPASWSGMTNLQSLYLYTNSLTGSLPAMWGSMTSLQVLSLYSNSLSGTLPPSWSNLSNLTYLEVNNNALSGALPTSWSGMTNLQSLYLFSNSLTGSLPASWGNMSSLQTLSLFTNRLTGTLPPSWDGMISLQTLILNTNGLTGTLPDVWNGMRSLQNLQLSVNFLSGTLPSLWGNMTTLTYLWLSQNALTGTLPSSWGSMSSLTNLILHTNSLTGALPSSWSGMSSLQLLYANSNLLTGTLPDAYSNLSRLTNVSLNTNSFSGTLPASWGKLSSLLYLHLGVNGLVGTLPPSWKGMSNLQNLYLYMNSLTGSLPASWGNLSSLQTLSLKNNCLEGFVPLALSLMPFVTNGGLTTCETKMKGGYNVPTCLAPNLWPFYCKYVASLTMTGSLTPSLTSSNTLVESATHSHSASHSTISLSLSLQRSTTPSSWNCEGQPGDVVLVLLPPVTELPPVVASSAIVAVVTADAPSSESARQQASISAIGTRLTTITARSVAREVLLQSSFLA

SEQ ID NO: 2796 - protein, 580 aa, Bodo saltans
MQLFHCAKNSISGTLPKSYRSWPLIKEFDVQYNQLSGSLPPEFADWRPSLFTLNNNQISSTLPPQYSQWGVSTQYFYLQDCDIYGSLPPSYSNWTYLMGFAIRNSRVSGTLPNEYASWVRIGTFVISYSSLSGTIPSTYNHWSSVTTIDLSNNHLTGTIPGNIWGSTALLTTLALSNNSLRGTLPAQLLQVPQLGYLSVGFNQLSGTIPPIASSQLVFQLFQNNSMMKGSIPTPVSLMVFRLMSICGTSLQCPTGGFFQLYCFPREMLYELTDPVIAVIAPFTTTCTLLPPPPPKMLDRSTTVTREVDAPAPSWTAATPFAPSSASVATSGVTVTIAIASSVLGTSTSALSGGTHGIQVALMTRRKRALCQLSAARSADDNGGPSDPHHSAISNPSLSDNDNDALLCCDAITSPTQLESIASLSPLIGALLGNTALVLILCLIKYSLPFAVRRFPGSNKKRGMVANGIAIALHTMAGEPTGPVSALWSPYMTLLAPTVATAFGAALLPGASARLKAIGALGVCLWVGPWVFCAYALCWRSRRSSFPFQAAAMRGQRSKSWWKRLMEPSINLIAAPSVVCS

SEQ ID NO: 2797 - protein, 256 aa, Bodo saltans
MSSLATLYIFQTNVSGTLPSSWKHFVAVSDLHLRNMLVGPLPESWSQMVSLQNLRLDHNNLNSSLPNSWAALQQVTAILLDSNFITGTLPSSWSTMTSLQQLTLSSNSIGGMLPSSWTNLRSLTQLQISDNRLVGSLPPAWVSIPSLQQLYLQNNCLTGTMPTFSNARLQLPSAINVCNTKIRGSGPNVSRCPGYQWPHYCNDMVSQTRSDSEVRASATWSGPLTSPTMSNTVTHSSSNESLSLSRLSSATVWCLL

SEQ ID NO: 2798 - protein, 480 aa, Bodo saltans
MSALLYLDLYSNSIQGTLPSSWCSMSALQYLDLYSNSLSGTLPASWGNMSGLQQLYLGNNSLSGTLPASWGNMSHLVYLDLYSSGLSGALPASWGSMSALLYLDLHSNSLSGTLPSSWSALRCQISVSNNCLTGAIPTTFSAAASSIQWIDVCNTGVWPRNFSTNIVAVCMPNTIRRCTSSDSSTLSAVAASLSRSSPLESQSLSYVVCGAAGVKLTPLISIVAAAPAFIFVDVVSPAAGWNEGLEPEASHIIVAKAIERAVLLQDPVVRMNISLMTQAFNTKRWDLANITMAEIGPLRFTLVNRSDDAVPMRWLVALVDPPTGSGGWIADSVPLFVDATFSMNLLFSCDIESTLSVTVTIPSPGIPRGLEGGVETSAKSTQIISLLSTGGAGSSLGRLLATRSLILCDADSAMNGGVVDMGIVICATTSTTGFVAARSAIVSNLLLLIVVFSALAVAMLSFRSQMTASMSLNTFCFPSS

SEQ ID NO: 2799 - protein, 382 aa, Bodo saltans
MTIWVSLRSTIFTLRATWQLLALTTTTIVSASMCGCQYRYALLMDLYTATNGAGWLNSSGWNATDDCNVDWHGVTCSADDVTSVILTSNRLVGTLPSSWWNMSALVTLALYSNGLQGTLPADWGSMTKMVSLQLYANSLSGSLPPEWSSMTMLNTLLLYSNKLSGTLPSVWSAMVRLVNLQLYSNALSGTLPTSWSSMSQMAQLYLYTNSLSGTLPASWGVMGALVDLRLSGNGITGSLPSSWSSMRALQTLWLNSNSLSGTLPSNWSTMTRLATLQLYSNTFNCSLPDSWSALANLQGLYIHAGNSLIGSLPAAWASMRALVELRLSDNRLTGELPSSWSSMSNLRQLWLYSNSLTGSLPSSWSNMTQMVSLFLHTNTFND

SEQ ID NO: 2800 - protein, 1449 aa, Bodo saltans
MILDTSHATTPMCGCMGQASVLMDFYNSSHPEGWTHNDGWGSTNCSIPWYGVTCNGASITSIELNSNNITGTLPSSWSSLVNISRLSLCGNLLLSGTLPPEWSSMTNIATLLLYYNPILSGTLPPEWSSMSKLITLYIFGTNVSGTLPSSWTNMTSMVDLQLYSSPLSGSLPPEWSSMSKLVQLYIMATNISGTLPSTWSSMTSMTGLQLHSNSMLSGSLPPEWSSMSKLSTLYIFATSISGTLPSTWSSMTSMVDLQLYSNPLLSGSLPSNWSSMSKLSRLHIYGTNISSTLPASWGNMTSMVDLQLFSNPMLSGSLPPEWCRMSKIAVLYIFATNVSGMLPPLWSNMTSISNLQLYSNPMLSGTLPPEWSSMSHLVALYIYGTSVSGTLPPVWGNMTSMTDLILNSNPLLSGILPSEWSRMPNMFRLNIFGTNISGTLPSSWSTMTGILYLQLNNNPMLSGVLPSEWSSMSKLELLYIFATNVSGTLPSSWRNLTSMRDLQLYNNPSLSGSLPSEWSRMSNVYLLFIYGTNVSGTLPSSWSTMTSMGLLQLNNNPMLSGTLPTEWSSMSQVTNLYICATNISGTLPSSWSNMTSTVYLQLHSNPMLSGSLPSQWSMMSKLSGLYINGTSISGTLPSSWSALTSLRVLKLSSNSIGGTLPPAWANMTSLQQLLISGNRIVGSVPAALLNVSSLWQLQVQTNCLTGTMPPSTNSLLQVPKAINVCYTKVRGSGPNVSSCPGFQWPEYCNDLVSHTMSASISSATISSTSSPQRRRSDSISASASKGGQLTRATTYSTFSHFAVSESLHPSALPTASIPSMTLSSTVTATAPSPSQWVCNVSGGTVLVQFTPPVAAVGDGGPVAFVVSVESSDNAARGVRLTTNSIPRATLVTSGLWIAMNISITAPGGEADHWVVGGVTISGDALNWTVQSSNTVPWSVIVLRTPTSGWLDASLSLLADDALDFAVKMLCDGAEILEVSISVPAPGVPRVYAEEIATVGRSSQVASAVASVTSGSALGRMMATRSMVLCDADSAVGGGVLDLKLEICGVSGEPSVVARSAVVSNLVFVAVAASALLLLAALWAVFAHTSILQATAVMRMPASLFPALVAIVPSTAASATLLLARIDTSECVASDVVLGIVGLALSTLPAAGFLHLWALRANKQWTTIARDMGGPTTTLHPLLAMLIRTVRRRWEWTTTDHGRKGMERAWPLLLEYRELRYGALDNGVLLALSIVSVVSGLTGSSAQCRGLSLVALLLLVAQLVAVIIVQPLTTTFSQLYAVSTVSLTCLGVLAQLLFVWTVESLWLVDAAAACSLAVLGLSLLNTALNAVQLLAAVRRRIVLLLKLRYERAQLLHGFASSHQSQPFAAVDLFRDSKSLALELDAVMLKAAEESDNESHQLCDNGLFWNSDGAAVGTELVEGHSDIIRTDYALQERLMAQAYDRYALAEA

SEQ ID NO: 2801 - protein, 255 aa, Bodo saltans
MGCSTLFSLLAIWWVALLWLRSNSALAGVSELEAEALGDLFVALTFTNTTPVTIDNACTAWPNQVMCDGNKSTITQLNFTLSQARGGTLPPTLSYLTSLTVFVVSNMSLSGTLPPEYSALGMSLQHFDVSSNLLTGPLPPAYRNWSHIKRFLAMNNQFSGTLPPEYSNMKQLEGLYVASNVLTGNFPPEYGTLMNLQQFFVDDNAFDGTLPPGYSSWNQVKVFFVSNNHLSGTLPSQYKNWTGINIFDVSNNATN

SEQ ID NO: 2802 - protein, 1114 aa, Bodo saltans
MPFLTVWAALGLILCIPLSTLSTPMCGCEHRYSLMMEFYNATNGAGWTHNNGWSLTPASCLTNWYGVYCYYNDVQEIDLPNNNLTGTLPASLGNMSQLVQLSLSSNSITGTLPPEWQSFKLLRYLYLWSNSLSGTLPPEWSNIFWLIQLDVSSNRLTGSLPPEWENIKPLARLSLSYNSLSGTLPPEWLGMNQCLTYLDLNSNSFSGTLPAAWSALTILAYFYVQYNNLTGSLPSTWESITTLITVDMTSNSLTGTLPASWATMTHLRTFAMGSNRYTGTLPPAWSNMTHLTTLFLWGNSLSGTLPPEWSSMKNVFNLQLSSNRLTGTLPSEWSIMTQLTTFFLWGNSLSGTLPPEWSSMKNVIILQLSSNRLTGTLPSEWSIMTQLTTFYLWGNSLSGTLPPEWSNMRNLIDVGLAPNSLTGTLPAEWANMTRITTLYLWGNSLSGTLPPEWSRMAMIAKVDVSSNHLSGTLPPQWSAMLRLTLLSVAYNSLSGTLPAEWTGMHQRLTYLYLNSNSFSGTLPAEWSALTILASMNVQLNSLSGTLPREWASMTQLAYFYLYSNSLSGTLPPEWSNMTALNIFYLSLNSLTGTLPPEWSSMTELTTLALSSNSLEGRLPSEWRALTSLVTLAVDQNCLSGAIPVFTTTHSPPMMLDTCGTKLRGRGGGGAVQNTCAGQPWPRYCQWLTTVTATLTRSPPSKTHANEGIETRDMDSLTWSSNATGSTVTATHQTLASPSSTRTEPSSTSSSKPLNRKMLSRSASSRSVSESISPADNEPMPFTPSNELSASVNPTTTIWQRCDVNVTDVNVSLSPLLNSSINQHDVVVLLSDQNEAVSTAIDPTTGVPTTSITTLPVARSVLSTAPLLALNVSFQSPSGAVVVHWVIDHNNVMVDGRRVNATVNPSNTTVIVLMQPPDGGGGDSGWLDASAPLLLPQTFGITMTALCDGGAVLVVQITVHVAGAPRGDVAAMVDVVGRYLQIASVFTGGVASGASLARVMTVRNMILCDGDAESAVIRGVIDLNVVVCESSRTEGSVDAAARSAIASNVVLVAAVAAVLLLLVLLWARVTRASFIQSTRAFCLPSSLLPVLALTVPSTTSACVKKKSRRCCLCWR

SEQ ID NO: 2803 - protein, 164 aa, Bodo saltans
MSSLRRNPERRCFEDAYPPQQVYVTAAHILPIMIAVLTLLGFWPHHHHHYAHAASCGNCSRVFQELYDATRGAEWTSAWNVNDITSNPCGLTGIVCSGESVYSISLAGRGLVGTVPASLGQFVFLNAIDFSMNSLRGTLPHELSRLSVVDLVNFSFNALSGSFS

SEQ ID NO: 2804 - protein, 796 aa, Bodo saltans
MRGLHEVLLLLSTVASSVGASMCGCESALPVLMDFYNATNGPMWTQASGWGSTNCSVSWFGITCSGNAITELNLTSNNLSGTLTESLVNVTALESLRIGSNRIHGTLPSSWRMLGQLQQLDVSRNILQGSIPSSWVSDNLQNVDFSHNTFSGTLAETYGTGLVSIDFSCNQLVGTLPAGWASIFGISYISVAHNNIEGTLPDSWKTMGAQSFFNGNGLRLILSYNRIGGSLPGNWSQLSTVSELRLDHNNLQGPLPDSWPAMSGGRLPILVLDSNPLNATLPRSWKAMSNTAVISLANCSLYGTLPSNWQFESILFLNDNALNGTMPHAWGNMGQTDVFSFANMSNNCLSGTVPWAYLSSGDPPPIMDTCGTRLDLATGNCTRLPTFWPAYCSPRLHMPTLAAGITRKSRSMTDSTTEHFSTTHSDTSLDIVPLHSPTLLSRSLSQARHSHTSPFFTSTLTPTVSMSPVLIQTTVGTVTTELLAAAASAPLPATALISAFSGVDPGSAQALLTVLQSPCIIADTQDHQAMVQHSTQDSMMPRASSIALSPLVLFGDDSTIGAFEVAIGNAGLALAVFVVHAALTLLHNRHNYEKSSYEEPAWVCSRGAMQHLACSKSAAVLRFPSLSINFALYLTPGVAWAVSTLISSTTVSAMEVVAGSVVGIGWIACFGVLLAAVVLHCWILDSEYGLTFRDFLDVQPFSPPVPRSIATVICSRRGQWGPSGRRAAFGSPIATSFLPEHMRWMWAVSPLMSLVAVSLNTARPPQAARTEAIVEYSKSGNCERRCGTQFRSCTKK

SEQ ID NO: 2805 - protein, 321 aa, Bodo saltans
MVTQMVNFDVDNNKLSGTIPASLDAWKNIQTFSATANNLQGSLSFRFSAWTSLHSFYVNQNPQLSGQIPHEFTSWTQIQYFRASDCSFSGTLPDELSSWTRIYTFDMQNNSVLGTLPSSFSSWRRATTIDLSANSLTGTLPAQWVGLREVIYIGLMSNSIEGTLPSSWSGLYNVTTLLLAGNSLSGDLPSSWGSLRLASLVLQQNENLNGIIPSSWSRIFIYSPSVFTLCNSALCAASPGNNAGVTNFMCFPPSSLKSFSYENAFTYYPPSGTTYTSRHLFRARLPQHQQLRLRLPPAHRRLPHRRPRPPQTATGSARWRS

SEQ ID NO: 2806 - protein, 230 aa, Bodo saltans
MNVGIVIVFICIVISGAVSSATCPCDTTTARTTLSLFYLSTGGESSWSTKWNTTLPLCEWFGVSCNNVTLGISLNLDGNNLRGPLPDSLQFLTNIEVLSLTHNSLSGTLPSSYGAWRSLANFEVAFNSLSGTLPAEYGAWGSGLRVFNVGNNQLNGTLPTTFSAWAGLTGFFCGSNVLSGTFPRAFYNWTSFTTLDISQNAFNGSLPLGDDAVHQSSGILWPKLASFRGQ

SEQ ID NO: 2807 - protein, 255 aa, Bodo saltans
MTASMSLLVSLLTMFAILPHAYHAGSMCGCERHYAALNDLFVATQGGKWNVRTGWGVNVACENWAGVTCNGSDVTALQLDNNNLIGTLPPSLRTLSGLKHVSMVNNLIRGVLPSAFSNWTGLQSLRLSLNMISGTLPEEYAQWTNLSLFYLYQNSIVGTLPSAFSNWTNLRSNRLVGSIPAEYESWTFLSTFDVGINILNGTLSAEFWKWGRMHYFDVSHNRLSGDLPSSFGQGWRLVTSFVLSDNLFTGSLPPE

SEQ ID NO: 2808 - protein, 273 aa, Bodo saltans
MWAKALILSSVVGAVSVLGEGPMCGCEHRYGVLMEFYDSTNGPSWGNPVSSVQGWNTSISCNQSWTGVFCTRGDVYMIVLDGLRVNGPFPSILANLTALLELKMPNNQITGTLPPSFNLLKQLYLLDVQYNAISGTLPSEWSSFDSLTTLWAFSNSITGTLPPAWSAMKNLQILDLSFNSLIGILPPEWSQMSSLHVLTLSKNALSGTLPATWSILVKLETLQLQNNGFSGTLPSDWCSLSSMRALDLSLNSFEGRFVVKCTLRGQICHFWKL

SEQ ID NO: 2809 - protein, 820 aa, Bodo saltans
  misc_feature (1)..(2): Xaa can be any naturally occurring amino acid
XXMQNNNLSGTLSTLFANWASLTTFDVSDNQHLSGTLSPSFAEWGGSLETFRVQNNSFYGTLPERYSAWGSTMLNFDVSSNALNGTLPPSYDAFVNLQSMYLYSNHFTGALPPQYSVFQKLQRFSLDNNGVTGELPPQYANWTSMFNFNVYNNSLRGTLPEAYALWGSAVNTITLSNNRFSGPFPSTWGASMTNLRTLAALNNSLSGTLPSSPSFAALLILAISFNNFSGILPSSGLPSLAVLDVQNNTYLSGPIALPRVLMATACGTQLCASAAALFATYACLPPGSIGDNPDVQQLQLLFVNNSMSLASCSATPPTPSTSSPSPNTSVNTTSPKEIDALTASSKAITSVAAATAAASVVSGVDAADAQMLVSILGSPCTCSGTETIVSNDDESVLLLALSPFSPFGSSWAAIGNSLLCCVLVAIHVFVFVCASLRNSDSPSRDRHHHRGASATLLGRWTSGGRHQRRLMRRFRFPNLSVSLTLLLIPGVVRWLVSIASSGDTSDSLAAAAMTIGVIFVVCGLAAVEVVVYRHLDLSLTTEQDNRTHNSSLLRYTHYLMIERIFAPVPMNVAKVVLPRGHWEPQSAKKSFGGIVSPFSGDWRRSWCVLVVVNLVVQILNSIGGSDAACNALQILTMIVLACASTFFAVTRPHRALLVSYLTCVSLLLSCVVTLLAMLCRLGSVDRSAVDGFGVFVSVAMMIMKAYTIGYPYAEAWLLERNGETIVTNESMVNGTQSFASETGEHNWNRQHSFSSSFSPERSFSFSLPSSPPNSPPSAVALAATVPPALRLSRSVEDVLREIIFEIAAQRKTAPMQRGNI

SEQ ID NO: 2810 - protein, 1324 aa, Bodo saltans
MGSHRLLIVVIVIMFPAVCFVGNAACSCAHRFPVLQDFYDATNGAEWVRPWDMTAVDAPCGFEGVTCGAANDITIIELTNRGLRGTLPPSLSQLSGLLKFQADSNALNGGLPPEFSSWTVIEEINLSRNSLSGTLPHEYSVLSHLTHFIIFFNMIVGTLPAEYSRCTNFKQFDAHHNQISGTLPPEYSSWTNFDSLALPANKLTGTLPSAYSAWTRLNWFDVSSNQLDGTLPQEYAAWTKLGAVFSVAFNQLRGTLPSSYASWGFLSRVDVSRNKLDGTLPPEYSSWTKLRSFAAVSNSFTGTLHASYSAWVLTTSFDVSGNKLDGTLPQQYGSWTAITTFDVGDNAFTGSLPPTYSAWQHLTTFFAPNNNLEGTLPPEYSAWLSVELFHIPNNKLSGPLPPEYSAWTKLRSFSALANSLTGTLPAAYSAWVPAYFDVSINDLDGTLPPEYSSWTAINVFAAGVNALRGSLPPVYSAWRNVETFDVGNNTIEGMLPPEYSAWATLRSFSALANSLTGTLHGAYSAWALTHFDVSRNSLNGTLPPEYSSWTKLIVFDTSSNALTGSLPPNYSTWQSIDTFDVGKNKIQGTLPPEYSSWTRVREFDASENELFGTLPSVFSSWTAIRIFGVNSNNFSGLLPPSFGKWIQMAFFFVKRNAFVGTLPVEYHLMSALIIFDASVNMISGSIPVQYTSWNEIVELHLNGNNLSGTIGDVVFGGWSNVRMISLSRNAMTGTVPPKLLALPTLESLFLSSNFFVGPLPKLPTSATSFLLLDLQNNTGLVGTLPFRSMIVTVCGTGVCPTASLPLQYCPPPEVVEGVLFALNKLDRASLLLGLASFASRCVPTGNATASTVRPTNATIVAEESSPNSPNTLSYSVGTTVTYLSSVIGGASGGAVRGGIPNLQRALYALRLALACSSDVVNVSSTMFSDLSDMPLGCRSPLDRESAAGATIGNAVLVVVVSVCLHLLALLRNRKLRDTTCWVALQVVPASLLPGSLAVAYGTQLQPSIGAAAATFASSARTVQSITCGVALLLLWLAFPLYCSYRVLVTCRHKDGQFTLISTLAGEHRRRHTSRRHQTRCVGRLALHIRQLREYLLNPRTTWKVPLASPHRGVAAFVLEHLEPVIGAYTKRREWYFVVEWSLVAVGGVVTGVAEAVAADGDACSAAEWATWCMVVIGATQIAATLALRPFSVRFEMLSSVLVGALTLLSLVLLLIDAEDAAQVTVSLSGILALLVMAIMLMNTAENRCSSQRRKQQEAASDSQAPEIDLTAPALKILPEMHRRRAENTLVKIQCATNASNDADEQRKEQLRVLIELACSCVHDL

SEQ ID NO: 2811 - protein, 177 aa, Bodo saltans
MTRVERRRNYFHDSWSSLAISVLWCLTMCVQCSNAVTQAEVDLVAEFFIATKFANETPCTLTTICNTWPALIVCNTVGVTAMNFTDQSLTGTLPASLSMMPFLASFMAQSNSLSGTLPPEYSAWGTRLVSFYVGGNQLNGTLPSEYAAWRSLIGFSTIANNLTGTLPGCGSRFHQEH

SEQ ID NO: 2812 - protein, 710 aa, Bodo saltans
MERSFDLFLLAVLTLSIFPCDVAGLCSCSSTAEAFRSLYEATGGATHWAKKWDTTGADAPCGFYGIVCSVTDGSVSIDLASVGLTGTLPDALSSLGALVTRVALSNNSLHGVLPSSYSSWTRITSFDIAFNGFTGSLPSSYASWTLITEFLATENKFSGSIPSAFDAWRAMARFRVETNYLSGTLPPSLGFAWANSLREFAVAFSNISGSLPAEYSQWNLISVFSVEQTNINGTLPESYSSWGKSITAFHIPTTNISGTLPTSWSTWGLLTHFRAHETQLNGTVPDEYSNWTSLVQFYIADNPRLGGTLPEMFSAWKSIMEFSIPFCNFSGTLPVNYAQWGTSLSIIRVRGNQLIGTLPKEYSAWTNLTYFTVRENRGMYGTLPPEYAAWTKLGLIDTHNCSFSGTLPPEYESFSLIEEVRFSANNFSGSLPSAYGSWVAIINFVMDHNPYLGGALPKEYRSWTNCLQVYATDCALSGTLPSEYSEMKSMRVLSLANNKLTGTLPSSYAAWKNIEQVYLSQNDLTGAIPNAWPLAMCSTLVLLILAGNQLSGTIPSDFSTCSKMSVFAISQNNFRGQLPSSWNTVSMPKLVGLSLQDNPLLSGPIPSSWNGIVNGFIGLLFLCNTSICGSSLSISLPFGFACVPRDRVFEMYGLLSVATDAESYLLVRTYCSFNTSAPCNSSNSAQQTTPAPSSPTANAASSLEATPRAA

SEQ ID NO: 2813 - protein, 413 aa, Bodo saltans
MMLRAEELVAIGLLLLFAAALPEGAAAVSDRDIEILNEFFSAVHFPTAIRANQTNVCTEWPNNVICGPREAYIAVLNFSSLGLYGTLPVSLGQLTTGLQSFAVDGNELSGQVPNECSQWGSTLQEASFYSNHFSGTLPPSFRNWTSVVNFRFQGNSLTGTLPQQYSEWKNVQVFLVSNNFLSGTLPPEVGVRLVAIFDSKDRNDKQLSFWPFTRANNSLTGTLPPEYSVWGSHLNSFLVNNNSLSGTLPKDYSTWTNIFWFYVYTNNFTGSLPPEYSSWQGILRFVVRNNSLTGVLPPSYSSWPFINSFNAIDNYLSSTLPSGFSSWGSSIVQILLSSNALVGTLPSSWGSSMTNLRSMSLANNQFSGAFSTTALAFPKMIMLTISHNNFSGTLPSNAWQALYVLDAQNNTHL

SEQ ID NO: 2814 - protein, 160 aa, Bodo saltans
MRKSDLLMTHHYFMQLLLCTLLVVVFITLNTSHGCMNQASALMDFYNNSNPERWTHSDGWGSTNCSIPWYGVTCNGASIISIELSSNNITGTLPSSWSSTVSISDLYLQDNPPPARMVQHVETDCTVHLWHQPFWYVALFLQQHDGNKLINAENPPTKRQ

SEQ ID NO: 2815 - protein, 1135 aa, Bodo saltans
MAPFHTRRVNVAFIFTTLLLLLLPLIVLAIDNNIINDHAHIEYAEERPQNKNHNKIVQSAPAPTTTTGAAATTTTTLKDSSTIHAALMNIYNSCNGTSWTSATNWGSTTASYCTWAGVTCSGSNNAGPGVLALQLNFGLKCNPFPWSQLGGDLGAGLFVLDVSGNPNIAGALADSLPTDMPVLQSLNLGGTSVSGTLPAAFGAVTSPWRTTLEILTLTAAVHLQGTIPATWSEFQAIQQLNLNGLSMVFGTYDAVPLPQGTQVSFASDASFTSVFVLENNDVDVTVDESTTSITNVTDDDVIDGHLPLGLYVSQGLTNLRFGTNNSFTIGTDSLFAGLDGDAEDNCLLLFSSVNITATALFVDPNSAYVSHYMYFDEALTPCLLTPAQLASGQVLIQMSFVAQASSGGSLIFTFIAIGQQQPEILQFDFVPIYNLSTSTILACTTFSSNGGPTMDHSSTMYVAWNEVTLVTTSLIDGTVAKSSFHGNVLINASIAEGYQVINVYAIIEALSDALPPSIVTASQNPDATCTMNLDPAGNAAFISCSTDNPYVWGTCNSCLASQVSQPSSSAPPCRECFTLPHDSGLVQLLASSSFSPSSSSPSSCFWTGSLVVNEGQATLSIPTNTIPCMVMSYQSLLIATVAAQPASNDHWKSFLLPLVADGQATEVATCPVLFVLPQGTTLCAEITQDNSPPGSVFYSLMTLPEGNPACGSPGAGGGCVLWTRVDRLSNGGGGSSNSGEFPPTAIVVHTPVTTTEFPVFFNETATGEYEWPMVNVTGFVKEFASLFTADVDAQQVTNITITTSGSVVQEMKFWTSNGLSLAFQLILFGCRSDIAGVLGVSGVSTAVTSIEECAQGPEFVLALLEVRAEGGDARTPSSPIYYNYTMRTPDTWTTPSMQPLPPGAFALSLEYLWLAATQSAADAGILPVSTALTFQLQSDASVCTTTEWLPIGGAFCASVSASSSPAPVFDRFVTLLLSAFSSTPTATSGPANVATSATSPFFFYTERCRCRHSPSVHGVDVPVAVRRISLHRHRVDSYWRCLLRFCELVLIAGTGVRSFCDVVTVCVFFHTNSNFRASKRRYKRHVTGQSHRWPTDCCVRGNFSDCSRAAVAHFDAERICSKRNIIYSIPQQCCI

SEQ ID NO: 2816 - protein, 914 aa, Bodo saltans
  misc_feature (549)..(648): Xaa can be any naturally occurring amino acid
MTSFSMTYFSWFVRFALGVVVCMWAAAQLTTAEDTSIGANFDAFSFLSSLYNSTNGPFWSDACSAGWRNHNSNPDPCDPLWFGITCTNPTTNASSSSSNVAVVTGISLTGCGLSGTLPPWVGATLNYTNAPSTRTRILLRTFDISNNSVRGSLPMSYGLAASPFSSSVRVFVVNSNQLSGTLPSQYSSWGSTFASFQANDNDFTGTLPEDYKNWTSLNRFDVSFNRLTGTLPSTWSNWTSLEVLDLSNNRLSGTFPAMIFSERLPQLRVLDIHNNVFIGSIPVALIAWWPKLTDFRAESNLFSGNISTIDNEIVKLSNTVWNWTCSLQVFIITFNKGVFGTLPASFSSCRNMTTFQALNLSLTGTLPADYGEAWANTITSFNVRLSNLVGTIPDSFAKWTKLILFDVGANNLTGNVSAVMQNWRLLETLRLANNQFFGTIPQTLINNSNLIQLYLHYNRFVGTVDSQLGPGCPSMFHFYVQGNLLTGTLPNSFSVWRNIQRFFVHNNSFQGTLPSSWADWGPSIQQVNLGNNQFNGSLPPQWSSWSNVXXXXXXXXXXXXXXXXXXXXXXXXXXXXXXXXXXXXXXXXXXXXXXXXXXXXXXXXXXXXXXXXXXXXXXXXXXXXXXXXXXXXXXXXXXXXXXXXXXXXSILELDEEDFFPWAARKSKPLWIDNIAPDFSFIGDNLSNRPESRFESKKHKLLSTARRRSHISLRKSIGRVQLLWQLSNIAIARPASANGGSIIPNPNICSFVDLAVAIAGVVSSIAQRSRFEYCWQRCSRRRNWRRPWVCPNACVVASLQVHVYLKWWSTVCIRRRRCVFRRCQLADFVSIYSTWPRRNGLWEQCDHSVDFRLPNASRLAHTTENAKVIQSDVSSTFAMSQPRRVSQSTSVITTANNAAMGSSLQITSSNCTSVS

SEQ ID NO: 2817 - protein, 143 aa, Bodo saltans
MKVAILLSGCVAFFEFFDLPRNRSLLCCLMKRRFSGNATRGTLCQDMLEWFLLELLLVLLSLSECAAAAACASADVPCGLEGVICDAAVSDITEISVPSRDLRGTLPTELGQLTAMNSSSWQTISLTGTVPSGALVVHNPAEA

SEQ ID NO: 2818 - protein, 1715 aa, Bodo saltans
  misc_feature (1383)..(1482): Xaa can be any naturally occurring amino acid
MYDAVSSRNHIPRHHFMILEILFFVCILHAANATTPMCGCMSQANVLMDFYNSSNPAGWTRKDGWGSTTNCSIPWYGVTCSSGSITSIDLSSNNITGTLPSSWSSFVNVTNLRLFDNPVTGTLPAEWSSMSALTTLVIYASNIFGTLPSVWSNMTKMQNLQLFSNPLLGGTLPPEWSSMSQFVLLLIFATNISGTLPSSWRNMTNMQDLRLSSNPMLSGTLPSEWSSMSLMFRLWVYETNISGSLPSSWSAMTRVSDLQLHSNPLLSGPLPPEWSSMSSVVALQIYSTNLSGTLPSAWSNMTSMVGLELYSNPLLSGTLPPEWSRMSRISSVQISGTNLSGTLPSAWSNMTNMQDLRLSYNPLLSGGLPPEWSSMSLLFRLWIFATNVSGTLPSSWSAMTLMQDLQLLSNPLLGGTLPPEWSSMSQVSSLLIFGTNFSGTLPSSWSNMTNIVTLDLHSNPWLSGTLPPEWSSMSSVVTLLIYSTNISGNLPSSWSSMTKIVNLQLYSNPLLSGTLPPEWSIWSQVSLMWIYSTNISGTLPPAWSNMKNMVDLELHSNPNLGGTLPAEWSSMSKITRMFICTTNVSGTLPLAWSNMTSMQDLRLYSNPMLSGSLPPQWSSMSSIFRMCVSATNISGTLPSNWSAMTNMQDLQLFSNQMLSGTLPPEWSGMSKITNLWIYGADISGTLPSAWSYMKSMQDLRLHSNPLLSGSLPSEWSSMSSIFRMYISATNISGTLPPSWSTMISMVDLELHSNPILSGSLPPAWSSMSKITKIWIFSANISGTLPSTWGGMTSMVDLQLYGNMLIGALPPSWSQMASLRTLRLDHNKLNSSLPSSLGSLQRLNTIQLDSNSITGTLPSSWVNMSSLTKLQISDNRLVGSVPPLWMRLPLLQQLLLQNNCLSGTMPTFLNPALQVSSAINVCYTKIVGSGPSVSRCPGYQWPDYCYGVASHTRSDSSFGQSSTKSGVLPSITNSSTLSWPSLTISRTVTAPSPSQWVCNVSSDAVFVQLTPPSIAMFDDGVVVAFVVSTDAGNKVVHAAGELSFVRLTTNSIPRVTLTTRGLSIAMNVSIITPGDTAARWVVGGVSMAGVVALNWTAQSSNSVPWSVIALTSPGGGWLGASTSLLIDKTLEFVVTMLCDGTQILAVSISVPAPGVPRVYATEIATVGRSSQVASVVASVSSGSALGRMMATRSMVLCDADAAVGGGVLDINFQFCGARGASNVVARSAIVSNLILVVIAASAMFLLASLLAAVAYTDIVQATVVLCMPASLFPTLVAIVPSTASSATLLLARLGGSDCVASDVVLGIVGLTISALPSAGFLLLWSLRVETWKAVARDRDALTSFHPMTAMLQRILWRRWKWTTADGHRTGMQRAWPVLLEYREXXXXXXXXXXXXXXXXXXXXXXXXXXXXXXXXXXXXXXXXXXXXXXXXXXXXXXXXXXXXXXXXXXXXXXXXXXXXXXXXXXXXXXXXXXXXXXXXXXXXLLLGLSIVSVLSGLTGSSAQCRGWSLVSLLLLVAQLVTLIVVEPLTSIFSHVYAIATVTLTCLGVLAQLIFVWSIDSLWLVDAAAASSLAVLGLSLLNIMLNVTQLVAAVRRRIALLLQLRTLGEIEPGHLRKPSVTTDLLFVRDESFEIDERSSKELVDGVLMMPEHLDDSKELVDGVLMMPEHLDDVHQLLDDGLFWNSDGAAVGTGLVEGHSEIILAHAPLEEPMRSRFD

SEQ ID NO: 2819 - protein, 697 aa, Bodo saltans
MKNNMTLFLLPLLFCSLDHATASLISSERTALIAFYNNTGGPSWTLSPTSPPPTTDWTGGLNRWSIANATVDPCVSWYGVACTNNIVTTLAVVGVQASGTLPDGLFTQFEGLLVLDLSDNKLSGVLPSLPNTIQRLRLVSNFFSGTLPDTYGLLSIIELKLDNNSLSGTLPSSFGVAWPFIIMFTIPANQFSGTLPSTWANWQLLQTFDVGTNNLGGTLPAVFGAGWGSSLGNFSSRRNNFSGTLPPEYCNWSNIELFQVDNNPFVGTLPAVYGPSFRRIVNVLISNTHISGSIPNEWGNWAATVVSIQLYMNSLSGTLPPSFGNFSRLSSLNFAMNNFPGEVPVAAWSPSWCSVYYLSRQPPPLWLDSCKLEQYVYVRYICWPPFDGVHLPLSDLCSAASALPFGYGCIPVSVIPLLETVDESNMEGVLAQMTWLPSVACNASVAPSPLPTPLATPTRTLFVPENKIHNGVVPTQSEIQRVTTASAAMIGTTIVIRQLVPSSVGGAGSMHAFQATTVVQHLRQLCLVASVAGQNSDDGSSTGNDNSVCCDGGTSPTQMSVGSGVSEAPLAGAIIGNTILVVAISGARLLVQYLLVRKFHLHFSGDSDACASDLAKDDDNNSLVVQGWLALVQSVLQTMAQLTHGGIVASLWVPFTALFTPTVAAGIAIMSLSESGGGVLPWASLASWCGQCLGLLL

SEQ ID NO: 2820 - protein, 509 aa, Bodo saltans
MVPPNHLLLQHLFLLVIVCSIVASSSSLSCPCIAPHYETLMDLYDATNGTYWSTQTGWGYIAQCWSGITCGGASNSDVIQLDLKMNQLSGTLPASLAQLASLEYLDLSSNKLVGSLPEAWSQLTALRFLYLSSNYLYGVFPTPWAAAVATNSSSSNSSNASSSSSGMVNIRIMSLNNNCLFGALPLSITFGSAFPSLTRLDLCNTKLKGGRSLMACTGSTSNSNRWPTACDLLPAPPRTLTKSRRQEVSGGSFTISSTVSQSYSTSCPSRLTVQFPSPSSSWSDSSYVAQMCRFSATRTRCSHAVPLALLGLMNNNSIISSSSNTSKGSEEVVVTGNYNNESSNSWTLMLASSMLLFIPAPSSSPSSASSFDSSSGSDDTENVIGGRLTVMFPFISSVGWALTSTSTDVSVSVARSTNATAQGTGGSNTSSLDNIQRGNITYTMPYSPTYSNNTVFTLIATCLDSEPSPMAPTIRVEIHWPPPPPTRSSVSSGANVAASLGSGLSMMAG

SEQ ID NO: 2821 - protein, 843 aa, Bodo saltans
MALSLLGTLSLLTNQLSGTLPSSWSGMSRLSSINLQNNQLSGTLPTAWTIPLLTTLSLGDNQLEGTLPDQWNISMPRLSSLSLQCNSIVGTLPSSWGSMIDMNELHLGYNLLSGTLPKSWGAMQALNALKLGNGDMDRTAQCSDITPLVGHGNRINGTLPQSWSSLSSVMYLSLEGNQLDGSLPESWSAMSYMINMSFAHNAFTGFLPASWSAMTIMSVLSLNDNRFTGTVPPAWGLMGTQQIIDEAGTFGRTLTLDLSSNCIRGELPPSWTTADHTRGLMVTVSSCFTFLVPSSGGECDGGAVPAECASWSAVSSRSLSLTDAVQPATTPTSTQTHGQSNTLSRATESASLHLRQTATMSPPIETIKSPSVSASTIASIAAATSLSAIAALVSSGDPGSAQALLAAIESPCVCDNAARFLSNSQSDIQSVLPASALVALAPLLSAWTNDVGATAASIMVETNIALTVGVMLLQGLCVGVGFLRRRRQADHKTPPMETNHIMLIAAFSGAHFPSVSIKVAMLFLPGVVWGCVRCMSMMLTDPSSIPTARLRGTSILGILFLLMVVLVIEFVVFRRWILNPSIGPVFLPFTNWYRLPSSSETFSPPIPRQIADVLCSRLGEWGPERRRTSFGAPLVTTFLPKNARWVWSIGPTVSLFVVALSATLATSSTACNAMQLSTIAVLTLSALWFAVATPHRAIVVSMVMAVGLVHTALVHLLGMLCRYELVVRDTVLLVASIGSWVLTAMRICVMLVALWEQHHLTHCYSTTTTRSPLHAAEDAMMMESLSSDVSSMVPLVTHQMFESSITLQHHAASRSGVKTNAALTHLVRLICAEGNDASGSLLL

SEQ ID NO: 2822 - protein, 1306 aa, Bodo saltans
SEGSQSVHCGTVASFIYIILLCTLFSGQFSCFFDIAVKSEMEISSCHTARRWKYDAWVVSVIVLMLALVWNAAAQSTCLCNSQANRETLALFYTATNGTQSWKNKWNVTNTSLCTWYGVSCESSTSYNVAISLVNNGLGGSLPNSLGNIFNVSSFSVAFNVISGTLPPSLSAWGRNLRVFSVASNLNFYGTIPLGMRNWSSLVNFTVTSNRFSGTLSAEFSEWGQAFRFFFVESNSFSGTLPLAYANWTNLTQFACAQNSLSGSIPSAGSFEQWTELILLDVGQNQFVGSLPLGTDAEGLIWPAIQVFRIVTNRFTGLLPEVYSRWTNLTYFNAAVNQLSGTIPSSYANWTQLTTMYLNLNSLSGSLSPGFGAWVNLQYFQVNNNLITGTLPSVYRQWTRIVWFYVSNNAMTGSLPPEYQSWSKVQLFYVQNNSFTGSLSPGYGLWGSSVTTFWANDNRFTGTLSLDYRQWTSMLSFFVSNNAITGSLPPEYRAWTSIQQFYVNNNSIFGVLPPSYGLWGSSITKFCVNDNRFVGTLPLEYGQWTSVEVLYVHNNAITGSLPPEYRAWTSIQQFYVNNNSIFGVLPPSYGLWGSSITKFCVNDNRFVGTLPLEYGQWTSVEVFYVSNNTMTGTLPREYRQWTSVVRFYVANNAVTGTLPPEYRAWKNIEWFRVQNNSISGALPIQYSEWGSALMSFYTVSNALTGTLPTEYSNWTNVNWFRTSLNHLSGTLPPSYGSSWKSVVTLQVFANSLTGTIPTEWGGLSTVVSLLLHANNLSGQVPSSFSNLKQITSLSVAANPNIVGTLPASWGTAWSSRSAPRLQLLWLQNTSITGTIPSSWSRTMFATVAYFSICNTNLCPPTTLAPTLFVMCMPGDLLQTQLFNDGTIASAIAIGSDAQFTTVIDALTSTCPIPSSSTPTPHQQDNTTTAAPAERTTIAPSTNSTFVSPEPLLRDHFFVSNGAKAATFTAPVGTALTTTFGSAAAGLGLYRSAGLMRVLSCGGNISSSADDGAAEDIFPLALGHVIAFVSTVLVAAVVVFTFYRRHSSLTAALVVLQMPGRFGFVAFALGPPLVEFGLALLLSRGGNIGLGIAAFVSGIALLSLVAIVISKVPRNATFTLSMHRTHHELQGGYSWRTAATSYESTRLGEWHPLFNSDADSSFLSRNRALFEDFTGGRHWYATLQCVVAFIISIVAAVADSDALDGSAPSACGAVEVVAGVCNLFTLAALLILRPYSSFSPMMQDIISELLGFVCGILVILVGAGLDTDDGLLADVAGVVLQIQFWLAIAATATLVLKACYLRLCLTA

SEQ ID NO: 2823 - protein, 442 aa, Bodo saltans
MKLHEVTLSSGRTFLYNKVSRMSSWFSLLLLIVLRAELGVGQTPMCGCEHRYGVLMDFYHATNGPSWGIFSVVRGWNTSLSCNQSWTGVNCTDGDVVSMDVSSLGVNGTFPAMLANLTALTILNIAGNHITGTLLPAFALLTQLTELDVRRNAIYGTLPPEWSSLDQLAALSVSGNSIITGTLPAEWSAMRNLIILDLSINSITGTLPSNWSQMPSLQSLTISSNALTGTLPAAWSGLSTLQEVYLQLNQLAGPLPVSWMDLVKLKRLRLWANAFSGTLPLDWSALANLTELQLSRNGLSGTLPSTWSTFSFMQVLDLSFNSFDGTLHSSWSNMSMLQTLSLSSNQLSGSLPSSWAAFTQLYVLDVSNNQLSGTLPRRWMEVGSAISPYSFNSLAMDLSFNKLVGTLPGSWLQISKLNTLEVSNNFLSGSIPLDKDHLCSEQ

SEQ ID NO: 2824 - protein, 1013 aa, Bodo saltans
MQQCGAFSQYVSLSFHITSNLILSFYLTTVAIRTCSHQDTVESSLNGPSLRNFLLLRNILTLRTLLIASVTLCISHATTPMCGCMNQSSALMDFYHSSNPEGWTHSDGWGSTDCSIPWYGVTCDGVSITSIVLNLNNMSGTVPSSWSSMVNITGLVLNGNPMLSGTLPFEWSTMLQLSTLYIFGTSVSGTLPSSWSSMTSMLDLQLYVNPMLSGTLPAEWSCMVNIFRLYIYGTNVSGTLPSSWSAMTSMVYVQLHSNPMLSGSLPSEWSSMSKLSLLYIIATNISGTLPSTWGNMTSMLDLQLYNNAMLSGSLPPEWSGMSKLTTFLMFATNVSGTLPASWSSMTTLMNLALCSNPLVSGTLPSEWSSMSKLSQLFIFGTSVSGTLPSSWGNLTNMAFLQLYSNPMLSGSLPLEWSSMSQLTMLYIYETNIAGTLPSSWSNMTNMLDLQLHSNPMLGGTLPSKRSSMSSVAFVWIFAANVSGTLPTSWGNLTSMSQLRLHANPMLSGTLPEEWSRLSKLSLLHIYATNIFGTLPSSWSNITSAVYVALNSDPMLSGSLPPEWSSMSHLKVLFLYETNISGTLPSSWGNMTSISSLVLQDNRLLSGTLPPEWSGMSSLTTLYLCGTNVSGTLPSSWNNLKVLSNLQLYSNARLSGSLPPEWSRMSKLSTLYIFATNLSGTLPSSWSTMTPRWQRACVVVEHSVTPAAATAKQLPHWDDACGHKPTSSSAQRHQRVQHKVRGGPNVSRCSGYQWPEYCYDVVSDTMSESISSSATASDLLLSATISRTQSHSTISESLSLSTSSTASMSTSLSPPSMTMSSTVTATAPSPSQWVCNVSGGAVLVQLTPPVATLGDGGPTAFVVSLESSDVADRASLVPSVQLTTNSIPRSTLTTRGLRIAMNVSISSPGNIADRWVVGGVTMLGEALNWTVQSSNTVPWSLIVLRTPVGGWLDASVSLLTDDALDFVVAMLCDGAEIIEVIFTVPAPCVPRVYAEEIATVGRSTQVASAVASVT

SEQ ID NO: 2825 - protein, 348 aa, Bodo saltans
MMDLVLTLSAILITLTKTSVATCACTRRASVIQTFYMATNGAKWLRPWDMSSADVPCGLEGVTCDVALGDITVISVAGRSLRGSLPTALGQLTAMTTFSVANNSLSGTVPPELSSCIALYSFDIWRNSLSGTLPPEFRAWTKMFVFSVGSNQLTGTLPEAYSAWGASQAFFYVDTNLLSGTLPGAFSSWTALEVFTAYSNSISGTLPPEYQSWASITDYHIQANSLTGSLPSTYSALVNLTTFDCSGNLLSGSLPEAFASLMKLEKFYAFGNSLSGTLPPGYGAWKNVTGVLLYTNAISGTLPSEYAQWTRVETIDFGVNALSGTLPAAYSRWTALTVLHLGLNSIWA

SEQ ID NO: 2826 - protein, 1152 aa, Bodo saltans
  misc_feature (714)..(813): Xaa can be any naturally occurring amino acid
MSGLIILWMFTNNLTGTLPDVWSAMTALQNVQIGTNSLTGTLPASWGNMSALTDLRLFQNSLTGTLPSSWGSMSSLTTLVLYTNSLTGALLSSWSSMGSLQILYLYSNRLTGTLPDAYSNLSRLTNLSLNTNSLSGTLPVSWGNLLSLQYVDLGINSLVGTLPAAWSNLSSLSYLAINNNSLTGTLPLSWSAMTSMQSLYLLRNGLTGSLPPSWGNLSNLQTLSLFINSLTGTLPSSWGLLSNLQSLQLYTNRLTGELPSSWSGMSSLQLLYVYGNFLTGTLPDAYSNLSRLTSLSLNTNSLSGTLPASWGNLSSLQYLHLGINGLVGTLPPSWKGMSNLQNLFLYTNSLTGSLPASWGNLSSLQTLSLKNNCLEGFVPLALSLMPFVTNGGLTTCETKMKGGYNVPTCLAPNLWPFYCKYVASLTMTGSLTPSLTSSNTLVDSATHSHSASHSTISLSLSPQRSTTPSSWSCEGQPGDVALVLLPPVTELPPVVGSSVVVAVVTADAPCSASARQQASTSAIGSLLTAITARSVAREVLLQSSFLSFNVTILAPPVAALRWVVGSVALSDTVVNFTAVSTNSVPWSLVAVEAPSVGGWVGSTPVLMATELTVTVTYNTLPRGHNSEHQTVPAPGAVRQYAAQVATATSSLQIASVLAGGASSGSALGRVAATRSMVMCDADAAVGGGVVDLGFALCVDDDSLPTSRRSAMVAXXXXXXXXXXXXXXXXXXXXXXXXXXXXXXXXXXXXXXXXXXXXXXXXXXXXXXXXXXXXXXXXXXXXXXXXXXXXXXXXXXXXXXXXXXXXXXXXXXXXRCPVVDAVLGVCGVLMALVPPLAYVGLWLGYTYGRDARWVCNAVGAEHEHETMLEKPHTNFSSGNNSRTDRLLGLLREGTRRRWKWRVVHEGRGRLQLQRAAVVVTEYRVLWYAALDSAVLIGIAMLAVGGGLNAQDTRLCRGSTIAVLVLLVGQLAVAVGVRPFTTLFSLVHGCVTLRNCTDSHEPVDDMRAVASSSSDSISGMWLVTASAVCDLAVVGVSALRMVLDVVELLRAVRRRYLSLRLLRSGAGDLLLNVNDDVRHDELSILTNGEDISHPYQLSSSTSVHLLLEGADDLAMLHQLNKGFWDESGAALGVEAEVEGEDHGLRRALLDGGVW

SEQ ID NO: 2827 - protein, 171 aa, Bodo saltans
ICKLDLPPVSVVQQQQLQWDVAVCVQCGTKLDSFDVSLNQVSGTLPVEYSAWNQLTIFVVYINNLTGSLPSSYSAWAKLDSFDVSLNRLIGTLPSEFGVWRHLTFSHAQYNNLSGSLPPSYCAWMSLDWLDVSNNQLTGTLKPQYSFWSALTIFSAGSNSQKKNEPRLARR

SEQ ID NO: 2828 - protein, 409 aa, Bodo saltans
MCNLRQTVCSATSPTQQREGSVLLLALSPFSPLGSAWATTGNSLLCCVLVGLHVLVIRTLWVARCRSKTSGRKIRQLQSLHATTLLGRWLGDDGDAVPNKQTRRHVLARLRFPNASVAMVLLVVPGVVRGAIDVVVMPSTDGGTLSTREKVALGVGVVFVTLAVCVVEFGVYRHVNAEVSLSLSFSVASPHRNAAHPRSSHSCCLRYVCHQCPAKLFRPVPSVLSHIALPKGSWESAAARTAYGGVVSVFDVRWRRAWVVLPSANIVIQVLSGVDGGSAGGCDAVQSVTLLVLRGVCAFMAYARPHRALLASYLVCASLVLTMVTALLGLLCRHGAVSSDAVSGFGVFASVAMFVFKLYHVLMPIIERWLLGRGSNVVRAATGKSNRDSPSNLFHLRQSLLVTDHKEVS

SEQ ID NO: 2829 - protein, 1329 aa, Bodo saltans
MSTVQSAGMCGCQHRYSLLMDLYNATNGAGWFNNSGWSMTPSACITGWYGVTCDGSDVTVVALHENSLAGTLPLSCWNLTNLTTLDFGINSLSGTLPLQVTSLTRLTALYLHANSFSGTLPLYWANMTQLMYLYVSYNSLTGTLPPQWSSMTQLRTLSLQGSRLSGTLPLEGGHDAVKRTLLVLEHLHRHSPFTMVTHGAAFSTVLVPKQTEWFAASRVVEHDATHRFTVVFQSLSGVLPSAWSSMTQLTDLQLSTNSLSGTLPPQWPSMVQLRTLQLSYNSLTGLIPPEWARMTQITELYLQGNSLSGTLSSALANLTTLRVLSLGSNQFNGTLPATLSRLPILTQLYLWINIISGTLPPEWGSMTNLNILQMSNNSLIGTLPPEWSSMTDLELSTNSLTGTLPPQWSSLSELRTLLLSYNGLTGTLPNEWSSMTRVTGLYLQGNSLSGSLNSGLPNMTALSILSLGSNKFSGTLPATFARLTQLTELYLWVNSISGTLPPEWSSMAQLTNLDISTNSLSGTLPFQWSNMTRLVALYLASNNLTGVLPFLWRSLSSLKSLFVGVNCLTGAVPFTLSTTQVNTCGTRLRGGVNVTPCAGQTWPASVLQSFVIENEYNICFNRSLTNCVAYKINATMSLSNAAMSLLSLMLSESQNRSSSTISAWKLSPTPSVSTSRRSFSDSTTVWQCFVAVNDTVTLTLTPLEQQIVQDAVVLLFDGQPQQISGAVLLAAAAAAVGHQIPTMFIVPRAVSRSYFVGDPPFLAINVSFGSAFSSAAISHWTIRNLTVNHQRVNATVYTSNTMPWVTIVLHPPSSGWIDASTSLMSSKTLTIEILFLCDAASVLLVQVAVEVAAAPRALASQVDTAGSITQITSLFAGGATSGASLSRVMAVRQMVLCDAAGAVGGGVIDMELSICDTSAERSSLSDARSAIISNIVLVGAVTTVLLLFVALWVRVRRTSFLDAVCIFCLPSSLLPVLSTVVPSTTASSVLLFARVGTSTCVGVDVVLAVLGLIIAALPFFGFLLIWFVKDCSGVWRCQRRSHRVAVGLDAFAMVRRALHRSHEWDSSEQGDHSLSAARVVLLEYCDLRYGVLDSGCLFAVACLSVVSGLSGSEAQCRAWSFLALLLLLLVQFVLLVVLRPLTTVVSTVHSFVTLGLTLLSVLSQLVFIWGYIADASGLWLVEASAVCTLAVVGVTGVKMVVDFIALAFAVKRRINLLCAIGHTDGARSSPLLHFSNMEKELSFLDQHDDDDGDKSTSLEQRVVGGAASAVGFDGQTFVTAQSSSHYGEVLLFGELQLTDDDKYWDASGVAVGTQLVDGHSDILFTSARR

SEQ ID NO: 2830 - protein, 948 aa, Bodo saltans
  misc_feature (304)..(404): Xaa can be any naturally occurring amino acid
MPSNRLRGTLPASLANLTNLVTLELPGNYLSGTLSPEYSAWKKITGVYLAGNNLTGTLPPSYAAWGASILEISVSTNSLSGTLPPQYSAWTNLGWISVGSNQMTGTGTLPPSYSAWKPMHQFSVFRNAFTGTLPPEYSAWSNMTNFYAYINQLSGTFPPEYSAWGTSMSVLEAYLNNLEGSLPSQYAAWKNLIRMNLGINRLTGILPNAYSAWTQMKNFIILNNSIYGTLPASYSTWTARNVLIFSHNKLQGPLPSAWSTWRSTPVLMFNNNTQLSGELPSTWTSGMMLPLSGYLSLCSTNICXXXXXXXXXXXXXXXXXXXXXXXXXXXXXXXXXXXXXXXXXXXXXXXXXXXXXXXXXXXXXXXXXXXXXXXXXXXXXXXXXXXXXXXXXXXXXXXXXXXXXQVPLRLLSEESEWPPRMLAIRPWARWSSVLASAFASLGTTSRTSSLQFAVVGSVLRSRCMTVSASGGNSTDSSSSPVLSTAVENPTQIYVAGLADAVEYAGGTVIGNTVLVLGIGVVLHFAACSLLTPTMSGAVLLLLPPSPSESGPSAGAVVLGVVGLIACAVLPVYLAWQFARARPCPVVSIGPSHNVRVDHQFILQRAAAWLSRRDDVWTVSQRSSQQINDAASGTLSARTFARSYGAYIAPYRSGWRMWWYFVEIGIAATGGIVGGITYGQEEDPCAAAVWSGALLATLSTGLVVLHVLMRPCNVMLDKWGAVCVGLLAAAADISAAAMDTDDVSGAFSIAAVAMELVFLLLAMCCSAIDKSKNVVQLENNTRKTVEPSKLFVAVPAVPAAVKRSPKDIPSAQQTRSSIGQMETFFFCAFSIAAVAMELVFLLLAMCCSAIGKSKNIVVQLENNNRMTVEPSKLFVAVPAAVKRSQKDVPSAQRTSTSIGQMETFLRHASLDERLAAIISAITANTDHRKIFKPTSEERRHKIPSPMNPT

SEQ ID NO: 2831 - protein, 529 aa, Bodo saltans
MAPLCFLLLVASITLYTSHATTPMCGCMSQASALTDFYHSSNPEGWTHSDGWGSTNCSIPWYGVACDGVSIISIGLPSNNITGTLPSSWSSLVNMSQLSLSDNPKLSGALPPEWSSMTQLTTLFIYHTNVSGTLPSSWSNMSSLLDVLLYLNPLLSGSLPPEWSSMSKLWRMQIYATNVSGTLPSTWSDMTSMVDLELYSNPRLSGSLPSGWASMSKLSSLYIFGTNVSGTLPSSWSNMSSLGDLLLLSNPLLSGTLPPEWSSMSQLSRLQIYATSVSGTLPSTWSNMTSMTNLQLYSNPMLSGTLPSEWSSMAKLSTLYIFATNVSGTLPSSWSNMTSMGDLQLFSTPLIGTLPPQWQSMSMVWRIFIFETSISGALPSSWRSMSNLGDLLLFSNPLLSGTLPPEWSNMSQLSRLRIYGSNVSGTLPSSWGNMASMANLQLHSNPMLSGTLPSEWSKMSKLNTLYINGTNVSGTLPSLWSNMSSMMDLQLHLNPMLSGSFPAEWSGMFQVQTSLRPTCRELCLPRGAI

SEQ ID NO: 2832 - protein, 272 aa, Bodo saltans
FLGVTNERSFVHVPYDAGSVPLRLLFEHKNIESEDQLPSTNSLFGSLPSRYGAWKRLTYFGAATNLLSGALPDDYRQWTSLTQLFVFANSISGPLPASYGAWGARANVFSVSVNQLSGSLPSTFSNWTSLLQFTADSNKLGGALPDSYGNWSSLSTFSCSDSLSGTLPSSYGQWARASLQRFSVPRNQLSGTLPPEFGNWVNLTYFDMSTNSLTGLLPASYRAWGARITAFFVMINQLSGSLDIAIPVWRVLEQTQRLASRQLWELGESHIL

SEQ ID NO: 2833 - protein, 1103 aa, Bodo saltans
MSHTMMIFLWLFVGVTIRSSDAACVCESALPALLSLYHATNGAYWRDPWNITSGPNGNNVSVCDLKGITCAAPQSIFIQLTGQNLTGTIPDDLAPLHPYVYALDLSNNSLSGTLPASMSLYGATIGMITVMKNPRLTGTLPPELRNWTNLLDFTANACDFYGTLPPEYAEWGASIGYFAVFTNRISGTVPSEYQNWSSLVVFSISNNQMTGTIPEIVFTGWGRNLLDLSLANNSFYGNPFSTTLCAYAVALNNIRLEYNRFSGTIPSSCISRFSALEQLYMSTNSFSGTIPSAIGSLSLLRAFDVSMNQFEGTLPAELSKLTALTSFSAQANNFSGTLPPQYASWLKISSFLVNSNKHLSGSLPEAYAAWGDSINVIRVSTNTFTGPLPDSWGRAFTSLTTLVFSGNRISGTIPASWSGMTKLTILGLDSNELVGTLPSSWKTLSSLQGLSINHNALLGGAIPPSWSGMSKLVFFVLCHTNVCGNATTFPYVAVLGGFTCPSSSLLATMKDTELINYVLTAPKVFSVECLNSTAGTPTPQSSGSNSGRGPTNSSASVLPYTTVATAAATTAVWSVVATRGLPISGASSPAASVAFLQGAFAASRLRRRCTAAEALNTESDPPLSDPMDNPTQIELPSSAGAYAGGAVVGNSALLMGVTLICHAAAALRTWDQLRPASSQRSRAVIKLLPSEGLRLPGGALAMYSLLLTPSIAACVVLWMSGGGGSGSDEEEETVAGSYVLGVIGAIIWVTPLGLITWRLLSVRFPFMTTKLRKRQPQRREEVVATNLSKPVAIAVVLPSTTNSDNNRENSSSKLKRSSLRWRRFFASVAELMMTPTHTWHIRDEFKGGGELTARSQKLFYHSYGAFFAGVRSEWRMLFALELFVALVCGAVQGAAEEIGTSGAASDACSAAEWGSATLAALTAAVLLLHVVVRPCLVRYDELQTIVLTALTVASEIANAVGGDAGEQVGEMIALTAAILQASLAVIEIFVERFVLDASPSVVASPYYAAAEEEEERSGAPQIDQSTLSSKRHARYGNPSDGHAPIITDPVVAASAADSLEQQQQPTRNFVTLSQIKGLKHVLKLIAVQQHRQRHHRSPPSSEK

SEQ ID NO: 2834 - protein, 623 aa, Bodo saltans
MTKNGLQGTLPPEYASWTRLLRFDVSMNKMNGTLPTQFANWTNHAYFAVDSNEFTGELPSEYAVWGAQLRVFSTRNNTFTSTLPPQYSSWVNMTIFQVDNTPLTGTLPASYGAWKAIVFVILCNTNITGSIPNSWGSWRTVTSLQLYMNKLTGTLPASFGNLSSLTSLSLAMNNFTGTLPGIEWSKLRGVQSIILTDNPFLSGDIPASWNNVFAGSGQAVTIVAVCRTNICAPRLQALMFGYACIPQFVIPLLSSEFTLAQLLMYSTFTASVGCVPPEPIEPSTTPTVITITTTTTARPLVTTSATPAAYSTAEIPPTTTTGPVSDASTISPTDVTASAAPAASNATPPTVLPSPSATELSHTSTAAAVTTTAIPPTTTESFSTAATVITAVPVTTPEPHVDIVVTNVTIVIRISGLQWSLVLNLSYATVVSLVALAIAFSLNVPPTSIVIHSLSIGSLVVNSSVGAAALTNGGVVSEAQLSSPIVAQDAVRSKVSAMSLEDVSDLYANTTNSTSANLSLTSVSVTSIVVVTTRAPTQSPDNKHDSSGCDDTCVGLVAGLGGGGGALLLIIGSVVVYTKRHSGRSYTKNDGGVLDHAAMNQAHRENAAPLLLSNHDVEMRDII

SEQ ID NO: 2835 - protein, 1384 aa, Bodo saltans
MYYQAHFHAPFTIGLVSPPLTSRKTPSMVACPLGTTLCISPAAYCGPSLRHSVANKFTGTLPTVYGAWWSLMNSFRVDSNSLVGTLPSAYSAWGSSLSVFTCDSNALSGTIPVEYELWSNLTQFYVAINQLNGSLPRRSTSMPVLWKDISVFGVAHNQLQGTLPEEYSGWSSLSSFVAGANTLTGSVPASYSRWGRLKVFGVGGNQLSGTVPLFFDNWTMLTTFDISSNSFSGSLPRSSAPGVSSNVLWPSLEYFSVATNSFTGTIVPEYSQWAHLTFFSVAQNSLSGTLPPQLSQWGASLREFIAATNLLSGSIPPSYASNWTSLERFDVFDNRLSGALPDVLSPLPSGGVMMWPNMNYFHSGTNLFTGTIPIRYASWTRLSLFAAWQNSLTGTLSPLFSEWGSSMQWFAVGDNAIAGSIPETFKNWTSLQRFDASMNSLSGTLPRIFGQCWKSLLTFSVANNGLTGNIPSEYGNWTELTSFDVSQNEFIGTIPSTFASWRKALATFSVAQNFLTGSIPVDISSWSQLQSFDAGGNMLSGTLAPEFGDWGNTMVTFSIGQNMLSGAVPPNYLIKWTKLESFNVSLNRLTGTLPPSSTTTLLVFDASNNFISSSLPSSYALSWTQLHVFDVSNNSITGTLDPSFKNWVLLRHFNVSHNMLSGTLPAEYGDGWKSLLSFRAGNNQLAGSLPPQYAGWTRIDVIDGFANKLTGSIPEAWGDSMKMLTTLFLYSNDLSGTLPLFIGALPMLSYVSLAANPQLAGTLPAAWGARGGTSLSLQPFVLLWLQNTSVSGPIPSTWAPSMFNSMFLLFSFSICGTQLCGPAPASFVMTSICFPDTLLRTEISFSNLGNNAVPIVPVDFALEHKCPTNTTATPSPRGNGTNNVSLPYKPSSRQLTSVAKVITGPLGGAVAAVIGAAPLALGIYRSSSLSRIVSCGGAGVEDGNNNNASDHNTLSGLPSFAEVDGGALDDLVRLTAGHLIALGSCVVLAALALSGVAMWKVNRKDASIDGHDDQSTALVGALKVLHLPGRFSMVAATVGPPLWEFGIALLLLRSERTLGGVASVSGAALLLLVAAVVIVLSPCGYFHARFVRTCHRASSVAPPHHDHHLHRAILSWWHSAAAQYDKNRSGEWLDTKRDVPFLAHYGDVFEELTGSRRWYVAVQCALAGAIGAISAISDAIGVDPTAVSDMSTSSMCSIVQIAASILNMGQLVALIVLRPYRSASSMAIDCVVELFGFLGGLLIFVAAVVGGDDDDDDDGSTSVADAAATALTIQFWLAIAIAVLQGLLAAVAYARAPTTTSSRFTTSAAIRPGTIMPPHDHQRKSVNARAMKYLPKRLFSGGTEKESDRNAVVALQHKQLSVLVKAICAHTLTRRKSNHSRPNR

SEQ ID NO: 2836 - protein, 1227 aa, Bodo saltans
MDYDVLMELFYATSGNTWTNNSGWGSTSVAICSWYGLGCTSSSSTAHVNTFRLSSNGLYGTLPSNISKLTSLTVVKMSNNALFGTIPDSWSTLTSLTEMALSMNQLTGTLPASWSSLQQLQFFEAHSNKIYGALPSSWVNLIGLRVIALGNNSLTGALPEGWSSLPQLESVTLYMNGLSGSLPRVWSAMSQLNTLLLHQNRLIGDLPDAWSNLTSLQQLRLGSNRLSGSLPNTWSTLTKLSLLDVNSNALAGTIPEGWIASMTQLAQVSFAVNSLQGTLSKGWASMKLLAFLSLSFNRFNGSLPNSWSALTSVQQLQLASNSLIGTLPSSWSAWSQVFHMTLSGNQLNGSLPKSWASLTQLEYLSLGSNELIGALPSSWSGMSRLSTIGLGNNKLSGMLPSSWDAYCSLTLLDVSKNQLTGTLPSSWMALSLLGTLSLWNNQLSGTLPSSWSGMSRLSSISLQNNQLSGTLPTTWAMSSLTTLSLDHNQLEGTLPDQWSITMPSLSSLSLQCNSIVGTLPNSWGSMIMMSVLHLSYNLLSGTLPQSWGAMLSLYSLRLGNGDMDQTAQCSAIAPLVSHGNRINGTLPQSWSALSFITYLSLEGNQLDGSLPESWSAMTYVINMSLAHNAFTGFLPASWSAMTIMAVLSLNDNRFTGTVPPAWGLMGTQQIIDDDGNVGGTLELNLSSNCIRGELPPSWTTVAHLSGVMVTVSSCFTRLQAASGSGCGVGAVPAECASWSVESSRSLSSTAVLQPVATPTSTHMQRCWSTSSTATTPPPHNSSSTNQTQLSMTAEISSQQTAVVVVSAPAGILTALAGSASIAVGVVRGGASMRLVACGGDDDDLETLAGGYLGAYCIVLAVVLCLLFRQRRTIAISWSEACEQLGMPGQVWVVLSSIVFPLVEFGLSLMRASENDRSSEVSLGVVAFCVGFVSLVWLMSTMTCRFRAVWRVAQNQKSISTVPSKSSLCTWIMSRSDGYEMDRRGTWVDDLSAAKHASPTSSFVECKGAVFEEYSDGRVWFVVWESGMAMVLSVLSAVSQLSPNACSVAQTAGAAVQICALPVLVLARPHRKARALALGVIVEIFGFVGGLCLLVSTTTSIAGDPWGDAASVALQSQLYVGVALLILDGLHTGRIRDTLRRWFGGSSGFLPQRRLMDAPVSVNVSNARRCARSVGRSDISTANFGNRGRAKELISRITALEVIVEMICIQRRTDSGQYLNQRLFPCSV

SEQ ID NO: 2837 - protein, 532 aa, Bodo saltans
YPYCFDVLRFFFKSVKTEEAMTFSWMKATLLLLSLCHSLAAQGCPCAHRAPIIRALYDATRGPQWTRPWDMTSASLPCGLEGISCSALRQDVTSIALYKRGLNGQLPVELSNLTNLVSIDVSHNFLSGTLHPEYASWAALTDCTFLNNSISGSIHASFSQWTSIASVNFAINKFTGTLSAAFSAWSNISWIAINDNSLSGTLPVEYARWPLIGSFFINTNQLSGPLPPEYSDWSSTITAFNVGNNSFSGELPSAYNAWKNLKDFEAVNNSGPLTGTLPEEYGVWSNLLYFFISLNNFSGSLPASYAAWTKIRRFEVDRNVLSGTLPSAYSSWVSVENFVVQHNLFSGSLPNEYGKLVELSTFNVGENRMTGTIPASYKTWTKVRNIQVFTNAFSGTLPNTYGALVMLEMFQATGNALTGTIPLSLVTLPRMSIFAVGYNQLSGRLPTRCSPTIKALLFQHNTRIVGALPMELSSFSAIGVCGTGMCPSTTLPFQYCLPSEVMFSSQDQSDLLRLASPFQEVCDPKAVVNLRP

SEQ ID NO: 2838 - protein, 467 aa, Bodo saltans
GSLPPEWSSMYRLSTLSIFATNVSGTLPSTWSSMTGMSYLLLHSNPLLNGTLPPVWSSMSQLKGLYIFGTNISGTLPSSWSSMTRLMDFGLYPNPMLSGNLPIEWSSMSNLMALYIYKTNVSGTLPSSWGNMTAMKILHSVAIAPSTAASATLLLARLGTSECVASDVVLGIVGLALSTLPAAGFLLLWALSANRWTVTARDREAATTFHPLVALLNRTLRRRWEWTTTEGGRKGMERAWPLLLEYRELRYGAVDNGVLLALSIVSVVSGLSGSSGQCRGWSLVALLLLVAQLVAVIIVQPLTTTFSQLYAISTVSLTCLGVLAQLLFVWTVDSLWLVDATAACSLAVVGLSLLNTALNAVQLVAAVPASMVLFFELRLRHAQISVGPDHQNDHLNRSLEAVDLLCGDKSLSLELDAAMLMMTEDADGELYQPLADGLFWKSDGAAVGTELVEGHSDIIRTDALVER

SEQ ID NO: 2839 - protein, 637 aa, Bodo saltans
MCNVSSQGATFVQLTPPVATVGNGEPPPVAFVVSTEPRAAVVRTGAAAPVVRLTTNSIPRATLTTSGLWIAMNVSITTPGDVADRWVVGAVTMLGDDALNWTVQSSNTVPWSVIAMRTPVGVSWLDASVSTIADKTLELVVTMLCDGAEILEVIVSVPAPGVPRVYAEQIETVGRSSQVASAVAGVSSGSALDWRMMATRSMVLCDADSAIGGGVIDFNVEICGVMGDASVVARSAIVSNLVLVAVAASAMLLLATLWAALAHTGILHSTAVLCMPASLFPAFVAVVPSTASSATLLLARLGASECAALDVVLGIVGLALSTLPATGFLILWALRANRWNALKRNRKALTTFHSLTGVLKRIVGRRWEWTTADGHRMGMERAWPVLLEYRGLRYGALDNIVLLGLSIMSVISGLSGSSAQCRGWSLVALMLLVAQLITVIVTQPLTTTFSHDYAIATVSLTCLGVLSQLLFVWAVDSLPLVDAAAACSLAVLGLSMLNMTLNAVQLVAAVRRRIVSLLKLRAEYATSLQLSSSKFEPSSSTDELLFPGDEIFDINVDEEAMELDAVMMMSGEGDEMSSPSGCDDDLFWNSEGAAFGTELVEGPSDIMLAEALQELPMEEEGYDRVSDADASEIVSFH

SEQ ID NO: 2840 - protein, 1035 aa, Bodo saltans
MSSRFVAVFLLVGACSLLLSGSTAITTVELDILNEFISAVNYKGNSTPLELKGDCTTWPEHITCSEDKKLISSLNFTACNLTGTLPASLANLNDIVWVDLGFNSLSSTIPSAYSVWGSTLRMFSVTSNRLTGTLPSTFSNWTSVTSVYFNKNELYGSIPASYSRMTSLMSFYFNGNRFSGTLSPDFRLWRAMENFYVSNNALNGSLPPEYSDWHALSQFIVDTNTFTGTLPATYALWKNLVRFHVQDNSLTGTLPSEYGDNFSILVSFLAYNNHLTGTLPESYGKMRILFELQCGNNSLTGTLPESFSAMTAMNDFDVQSNSLSGTLPSSYSQWGTNLEMFSADENAFTGTLPRNWSNWTNIEAFDAHSNSLSGTLPPQYSSWTSLSRFSAYNNSLTGTLPSQYSLWKNVSHIYLYSNSLSGPIPSLWVQLKLLITLLLSSNQLSGSIPNLSSLQLFSVSFNNFSGSLPIDASWSALQLLDAQNNTFLFGGFQGFLSPVLMTSICSTKVCNQNRNLFLVFACLPIGTMSATRSIADWLVLWESETDDGCTSFIAPAANATTSRTIPFPTDVNDSTEVEIRTFLSSASIATVTVFTSFVTGVDAADAQMLTTVLGSPCTCSSTAAVATERSILLLALSPFSPLGSSWAAIGNSLLCCALVCAHIVLVCIVDRRMHHEKSSVASSAKVRGSTALGRWVARGCRWRPSVLMRLRFPNLSVSVILLLIPGVVRAVTSVLDGFPAAGDSTGLSVAAVVIGIVFVLCSAIAVEMLVYHHVNASEGVKNAAQQQQMRIQYATHRHIERIFAPIPPYVSRITFPQGRWEPEVSRKSFGGIVARVNGRRRRSWCALAMINIGVQILNGVGGGDAVCDALQSLTMIVLVCAAAFFAVIKPHRAPLASYLTSLSLLLSCVVTLLAMLCRLDSVDRSAVDGFGVIVSVAMMVMKVYHIALPYMEAWLIGRNATKSPEVTHTAASATLQRRDVLEPSNHFNLKLRRNHERRQNADDVRAVDAAGSEMSMSQFESLRRLVTMICERSIT

SEQ ID NO: 2841 - protein, 700 aa, Bodo saltans
MGSTLPLLYGPFLTLMLSFNALEGTLPVAWSNFSKIFWLSVSHNDVFGTLPASWLQQKTLSTLELNDNLLSGSIPLGDNTSTVLMLLNVSNNCFIGTLNRTVRTTLTVDVCNTHVHEGSALSTCASRLSQRWPQECNSQSQSLSLQVSRSRSTQPTSTFVLGGPSATQRPSSSGELKASISATIMFLHDPSSPLPSLATAASSPIAATAVISAVSGVDSGSAQALLTILDSACSCTSPTRSLPRQRQGVQYQEVEQRSSVPRAASLALSPLVLIGDSVGPFEVVIGNVALCIGMLFVQCTVVVVHHLRCTDDDESQVAEKNGVSVNHKPLSHDRVLNVHHIACSPSGALFRFPSATLRLTAFLVAGIVWGVAQLLSSPDFFTDNGAEEGNLDDLFEDAQGFDTITVLLGTCIGIVFLVCLGAILYVVVLHSWILDGAQGLQFEPFARVRGNTNPFSPPFPSRVASVLCSREGQWAPIPRRAAFGSPIATPFMPWCLKWAWAIGPTTSLIAVALSTAAPPSRHRTRACDGIQAVLICLYIVTAAVFAKLLPHRSIMRSLLAAFSNTLNGAVVVLSLLCRYELVGRDSPFIVASVGGYMSLCGSVLMFVVDRLEQRVLQGQQGEQAASSANSRRQSQHQHSRIDIRAYSAEQHDDVLRLQQLAALQRLIERHVKGLSQVTLVTHVTDSKDAVSAQSLSRVEE

SEQ ID NO: 2842 - protein, 881 aa, Bodo saltans
MTTTASLVLCVVAAALILQGATAACICDTNTDINNALLSLKSSLNITGWTAASSCSWPGVTCSSSLTGLTLCSTAFIFGAPCVGGSLPTTTATWQYLGTLTSLVISNTGSKITGSFPVAASTSLTKLSSLTFNSYSPTGTMQLPTGSTTGYSMVLSSSTITITGSSGANIISLSASSSPVPDVSNIASLRTININAGSLATLSWTSMTGLTSIGVSSVSASILPSWTNTNFPSLQSIVLYSVTAATTFPTTWSTLTTLTAISISYCTSLTASLPTTWSSLTNLKSLNVYSTPIAGPLPSTWSSLAITSISIYSASLSGATLPSSWTQMTSLTTLAITSSNLGGTLPPWQSTTLLTYLGLGSNSISGPLPTTVIGWSHLVTLDLSNNPINSTIPSWQLASLTSFSCSSCNLIGPLPSWGSGSTPMGSLRTISISSNMIGSSIPTTWGQMAALAYLYAASSSITGQLPLTWTSTSLQGISLSGNAITGNIATLTFSSTSLSSIDLSTNRIGPACSFTVPSMLSMLKLNDNQCTGVHPNWGSATSLSTVDIGGNAFSGSLARIPSTALRILRVDRGNRFTGSLFNWTASTYLYEVRANNNWFSGTLPAFSSSASLETLLFAANNLSGTFPAGTDLSNIELLDLSANNFVGTVPLLTDSSYLDELNISFNSFTGTLSLDDSSSSSLTLLDVSCNFLSGTVPPWSGARYLANVNLTCGNDFSGTLPAFSSLAYNYLVTLDVTDQGLTGTLSTILGSTLSGGSSSAVTSMLLGGNSFSGTMPQFLKWSQLVRFNASGNNLIGSLATTGGTFPSNLWSVDISNNNALRGTVPVPSSTSVLQHFLLGGDAHTFSGTLPSLHAIFPNLTRFSLSGSFPVTFPYAWLVGSA

SEQ ID NO: 2843 - protein, 122 aa, Bodo saltans
MTLLDFQSNSFSGTIPDAFASLTKLQYLDLSINSLTGTIPEGLSNLFHLDYCSSNSPTGTLPTSFSRLTRLVSFRVDSNQLQGTLPHDYASWGATLNTAFFQLNQFNGTLPPEYSNWTKNDL

SEQ ID NO: 2844 - protein, 314 aa, Bodo saltans
MLDVSSNNLSGTIPVQYAAWKSIDKLRHDSNSLSGTLPNSLFGGWTFVVDINMRMNGIIGTIPPALLARPALQKLYLGHNMFAGTMPSTIAMSVELLDLQNNSGLVGTLPFRLMLVTVCGTGVCSTGSLPLQYCLPATAAELKFAQLAPYASICTPSNEPTLSTATPLAINSTSGNTTSSQQSLARGTRSIGAAVAFASTIVAGGGAVRGAVPGLQRATTALRLALLCFADRGASEAMFCDPSSNAIGLSVPVGSSGLECAAGAAIGNAVLVVAVAMCLHSVALLRGYSRMIAAPISSTARSALWMLPASLLGP

SEQ ID NO: 2845 - protein, 480 aa, Bodo saltans
MNAYRTIRRGFLFTISSLVCLFCFATLPRTICLVPSMAVEYSYLRYVFHSLAIYVTMTIMVVTCVGEMDYAVLMELFYATNGSTWSKNGGWGSTSVAICDWYGVGCTSSSSSSTADVSTLRLSSNGLMGTLPSNVSKLTSLTVVDMSNNALFGTLPSSWKNMLSLRVITLGNNSLTGTLPEGWSLLLQLRNIGLHINRLSGSLPLAWSAMSQLNTLLVHQNTLSGELPVAWSNLNNLQLLNLSNNQLRGTFPNSWSAWTKISIIDANNNALTGTIPEVWIASMNQLTQVSFAYNSLQGTLSVGWASMKKMIFLSFVRNRFSGTLPNSWSALTSMQQLQLASNSLIGTLPSSWSAWSQVFRMTLSGNQLNGSLPESWASLTQLEYLSLGSNELIGALPSSWSGMSWLSTIGLGNNKLSGMLPSSWDAYCSECKNLQRFLVDCPCEGSSTYRERNNPCESENWLVERPWNGSSTSPYLSDSR

SEQ ID NO: 2846 - protein, 778 aa, Bodo saltans
MFAMLTPLHSSSPYAAYVRPSYRFVCLYSTKVVFLCRHRLRCVSWVVFILFLSALTVRYPPHESVQLTPTSTWSSVLLVSASGNLCSCQGELSILGDFYVATNGASWKNSDGWNGDCNQVWFGIDCHGQHVAEINLPNNGLTRTLPDSLAALTGLTTLYLGINNIGGTLPVGWQLFASLTLLALYMNNITGTLPPQWGNMRTIETLSLYNNQLSGPLPRNWGSMSNLATLYLHNNLLSGSLPENWATSMTSLGNLYLDNNSLRGTLPALWSSLPLAVLSVSYNCLYGPVPLSYINLPLQIDGFRVCGTRITNATRCVAPCTNSTTTPAPANGGGSTTPYDNNTPWPAFCHEDDVASDSVSSTMSSSAEHISGAASTTASVTSTKMETHTMTTSSSGTNSGMSKSKSEISTSTSTSVSASLRRTVVSTSLSKNPSASHNLHATPTTSYDNAISQTSVVTQSSSIPSQTKSKRASTTTIFSSTTSRSAPAASTWVCGGGGMISPTNISVALMSPNFIPFLLGTGTTTTSVVVLQQDADQPSVISLSTSASAPLLRGDVTSRPLRRDVLLAGGQQPTTIVANISFSSNSSSSPLRWVISNVSTASMSLPGSTAPTALSRWVAETSNDVMWSTIAVEAPEGGWIPSNTPSIMDTSFIVTFTFSCDAGAVLEMVVTVPAPGNTLSIAGKVEAATRYSQIASVLAGGASSGSALGRVMATRSMVLCDADSAVGGGLIDFHFVRICTEDDGDSTRVVARGAVVSNIVVLAVVTTSLCMCAVAWMF

SEQ ID NO: 2847 - protein, 1060 aa, Bodo saltans
YHHSEGHNFEALMMGHSILTLLFLVLLLVSRTHSACNCTFRLPQLRALYDATSGATWVRPWNLSAADAPCSWDGVACTSSDVTAMSLGGRRLQGTLPSILGDLTALTVFDVSNNSLTGVLPPSFMGWVNVQTVDLSLNTFSGDVPPDYSTWLSISDFSIHQNNLTGNLPPTFASWTFISYFDVRNNQLTGTLHAEYSAWSKVTQFLVNTNRFTGTLPVAYGQWSSLRLFRAQENFLNGTLPSVYSNWTGLIDFYAFSNQLVGTLPPEYSAWSRIDTFAVHVNSLTGTLPDSYSAWQNVTTVYFSNNNFSGKLPKVYSSWASAVTILFGFNSFTYTLPAEYGAWRKLQSFTVENNTLSGTLPPEYGQWSQLSNFYVRNNNLSGTLPSTYSAWSTIQQFYVLGNMLSGTLPAAYNLWGSSIRVFAALSNRLSGTLPPEYSAWSNTEGFFVSNNGMNGTLPPGYGAWSSIKMLGIEGNMLSGTLPPEYENWMIVEVFQAHKNNLSGSLPPEYKTWRRIQVFACHSNGLSGTLPSSFQLWEALQFFYGNNNMLTGTLPPEYAAWVNLKELGVHDNHLSGTLPHQYSAYAVLTSFVVRNNHLTGTLPAAYSAWRLVQTFYTDTNNLSGTLPTEYSLWSALQIFQVHDNQLNGTFPAAYSAWLQLNTFATQTNLLSGTLPSQYRAWSNIVAFAVSGNQIIGTMPFSDVLWPKITSFYVGNNSISGQLPTQYALWTQMQYFYANDNSLTGTLPQGYAAWVNLKQFVVTNNKLTGTLPSQWSVCAQLSSFDVRLNLLTGTLPPEYSAWTSLTQFLSNTNLFTGTLPGGYSTWSSLELFVVQENQLSGTLPVVYKEWTGLIEFHVNTNNFTGTLPDEYSSWSSLQAFHVYGNQLRGTLPSSFKSWTMLNSFQVCQNSITGTLPSEYSAWKGLQSFYAFSNMLTGLLPPAYSAWESLQYFVVYSNQLSGTLPSEYKVWTSLTSFQVNQNSLTGTLPRDYGFWSRNSVFTCSNNMLTGSLPSTYKNWSGMQSFFVSSNQLSGTLPPEYSAWTELQTFLVFLNNITGTLPPQ

SEQ ID NO: 2848 - protein, 325 aa, Bodo saltans
MMHRTFVTMIAVVVAACLFHVASADWLGLNFNPFFDFNRQSTALIKFYEETQGATKWPNQFRGGWASQTPCAWDGNERAHPAPWGTRCVTGGWHQPPPRGDGGLLFLEHYSGFAEGPVPREFDAFQMTDVIGLGHNKLNGPIWDTQYHTFLHRLDLAHNQMSGTLPDNFMKRNTIHCELVNLYDNQFTGSIPAIINTLKPLTAFLLGKNQFSGTVPDISNLKRLRHLDLGDNQFSGTIGPWLKELDNLAWLFLQNNQFTGTLPELPPRVSRVLIGQNKWTGRIPESYGSLGYLRVFNCTGCQLECPTPNFLQHVYFSTHCKTPKW

SEQ ID NO: 2849 - protein, 1166 aa, Bodo saltans
  misc_feature (875)..(974): Xaa can be any naturally occurring amino acid
MRWQRPVTLLLLLLCSCLFRCYLANGAALQAEVDIVAQFFQATRFRNTTSVTLENLCSGWPAMILCGSDRVVELNFGNTNLAGTLPTGLSGLISLSSLVVGRNQLTGSIPLDLCRSGNVMNVQMEGNLLSGALPPELSNCTFMRYFNVSNNNFSGTIPAAYSAWGTSIFIFGIAMNNLTGTFPPEFARWTTLDSFAVFDNQFSGTLPPEYSSMKAVKYFDVGTNLLTGTLPDVYHQLRAIDFFTCSNNLLSGTLPMSFGSWNKMDTFRVNNNRFTGTFPKEYATWNVMIAFNGAGNSFTGSLPPEYANWTQLVSFSANDNFLSGTLPPQYGSGWKNIAIMKVQNNSITGSLPAEYSALTTLSVFNVALNLLTGTLPPQYSALVQMSKLVLHDNAFRGPIPSSWGTGMTSLQSFAAFNNMLSGTIPLIKSPLLTKLAISFNDFSGSLPAPTSWANLMLLDIQNNSKLVGSIALPATTFVITPCGTQLCLSQREVVLASQVCLPTGAIAAVFGKDVIVAILPLLGAYSYATAPCVAPTSPPSSSVAPLVSPPPVIGSVAMPTTVQLALGSAVYATLLTGGASGVGRGVVPTLQRAVASQRLAARCNAAMGNANTSTIYANDGGSTMFSDLADNPLGVSIPVGAEDLSAAGGAAVMNAVLVVVIGTALHACALLQQWVKLHQREKSHSDELTSVTSKVAHTFVALLPASRLPGSLAASYGTLLQPGIGACVALVVSSARTPASVACGVIVAIVWMLLPVHSVFVVLVRARRVNGKFALQSGAAEVPTRSQRQKQISHPHAPSSFARALWSSLQRAHRYATHATERWSARPAAEMRALSHHRLRVKCQLCHREYATYLLENMEAVFGGYVGRREWYFHXXXXXXXXXXXXXXXXXXXXXXXXXXXXXXXXXXXXXXXXXXXXXXXXXXXXXXXXXXXXXXXXXXXXXXXXXXXXXXXXXXXXXXXXXXXXXXXXXXXXRCDGRRGGCVVRRGRVCCCAVGDVVRGCAWRCAGGRACCLASEQRAPLWSGIVLGLLGLLSVVLSLAGADDAAESAATVGSILEPVVVLLLLLGTWRRVYESSQKQLDADEHQEQRLIPSSAAPPLPRDLKDVRQRTGVCGRTVAAAVGVSTDLLLLLAKQPTSDHEVKEQLQTVLELICEQRSARAKMLGS

SEQ ID NO: 2850 - protein, 899 aa, Bodo saltans
MPDARVFFLFLFLLCEAEEPRMTFQYVTTVLVILLHFVCGNNNRSSDTINPTAERAALVLFYTATDGATWSLNDSASSNGLTGLGGQPWDVTNSSSNYCYWFGIQCGYYVIATNEPAYGVQAIQLPSCGLTGSLPSSDTWCSSLPILSILNLPNNKLQGTIPESLGQCTGMINFVLYSNRLQGTIPSSLSQFTEMINFNLRGNQLVGSLPSSLSTFTDIEFFDVSANRLSGTLPPQYASWSVLWKFDVAENALSGTLPAAYSSWGGSVAYFYVSNNSISGTLPSAYSAWTNFSVFGVDDNQFTGSFPPEYSSWGSSLIEFSPRNNQLSGSLPPEYSAWVGMTTFQVDNNPLTGTLPASYGAWKRVVYILICNTNITGPIPSSWGSMSRLYSLQLYINSLTGTLPPSLGNLTSLSSINLSMNNISGTVPVEAWSKLRVQSIMFQDNPHLSGNITASWNNIFATSAAGLPAIMSVCRTNICASKLSTLMWGYGCLPTAAIPMLLSVTLENMFSLFSIAVWTTSVECSTLAPSVAPTAQPTRTRTFHWEPTPPMNTTEMPPLERAVSDVSAVVSTAAIAAGVTGAASGGDLQMLSSVLGSTCMCGTVAATSKTMAYTTSPFANLGFAAVVVGNAGLAIAVALVFRVLLSVLVRRRLRKKPQAHAADERNEVAAMLRFPSFNIRLALFLNAGIFKAAIALITTIDDRSTAEIAAAFVGFAYVLCLGAYLETVIYRGRVLKIPLLYEAYTLQVDYHPVPQKVSRVVLPVGFWGPKLFRRQFGAITNGLRGDCTRLWCVLPLTNLATQLLFVLPVETSGGCDAVQIIGALVLIATSAFWCASHPTRALTSTLFSCASLLMVALVNITGALCRHNISSSDTVLKLALVGSNYRNHRNCEFAVDVLW

SEQ ID NO: 2851 - protein, 134 aa, Bodo saltans
SQMTTLHLYNNNLIGELPETWSSLSAMTVLWLYSNGLSGTLPSPWSSMSQMRSLYLSVNSLTGTLPPSWSSMSQMTTLYLSINRLSGTLPTSWSNFSQITSLFLFSNSLSGTLPPSCWVPTTPVCCLPPCWPGE

SEQ ID NO: 2852 - protein, 985 aa, Bodo saltans
MQDRRYDCRWLAVTLFMLVSLSSAKVTQGEVDLVSEFFVATKFANETPCTIDTVCVNWPQTINCSDLGIVVLNFTSKSLTGTLPSSLGSLPHLAAFMMQGNSLTGTLPPEYAAWNATLTGFFVGDNKLNGTLPPEYGAWKFLTGFTVFLNNLTGTLPPEYSALTRLGMFDASHNSLTSTLPNEYSRLTGIHDMFLCYNQLNGTLPKSYGAIINMYNFQVNSNQLTGTFPPEYSAWSSLSVFVADTNNFTGTLPPEYANWTLVNSFYCHQNQLTGSLPAEYSSWTSMVRFLARDNQLTGVLPSSYSLWSKTDTFNVNNNMLSGTLPPIYLLWGTSVSAIAIASNRFTGSIPVSWGQAMTALMQLTVSNNSLSGALSSLLLFPSIKLLTLSANYFSGSLPPGVWNAIQVLDAQNNTDLVGSFSYPSLFAASVCGTSLCKSSSTSATVLTCFPPSVQADLTNLAGTEGLLLLVKYQVVLSACQQSTLAPAATNTTSAPRSGSTVGVPQVIEGTSTAVTYVSLFPSGAVSRGAVPAVQRAAIVLRLSVMCDTQGGNMSSSSEGPLFNDLPNNPLNADIPVSTQVLGYAAGAAVVNLALLGAIGVVLHIVAAAHRYLKQHSLHSTLRAFLGVLPSSLLPGALAVPYGTLVQPGVGACVALLVSDARNAQTIVCGVAMLLLWMSFPIYCVTTILWCARRWGTSGAFLLRSVPLQREQRRTKRRAHIFSTMVRYVMRPRERWQPRTDDERRMPRHEEFHCQKEEVLFLRGNMEAVFGAYVRNREWFFAVEWGLSTVCGAVLGAAQAVAVDGEACSAVQWAAGCSIVFSAVHAALCVWLLPNSVRLELWSALLLDVLSIVSAALVLAGLDDASNAVANIAAVVQVVLIATVMCDAVVFRLQQQDEILDVMQPSSLRSPAKQRPMLVPQRLGDKKQSDHILSDLLSMSAPTSVSDQQKQLQRIVGLLCEKQQQRRDKIEAPLYFPADFPPSFID

SEQ ID NO: 2853 - protein, 567 aa, Bodo saltans
MMRWCRGAALLLLFLCSCLLFCPCPSCSADGATLQAEVDIVAQFFTVNGFANITALTTENLCSGWPAMISCNADRVSALNFRNINLRGTLPTGLSGLEYLSSLVVSDNQLTGSIPFDLCRSGNNLMNLQMGGNLLSGSLPPEWSNCRSMKTFNVSSNSFSGIIPAAYSAWGMSITSFEVSANNFTGTLPLEFSNWTIVSYFAVSRNQLSGTLPPEYSSMKALTYFDINMNYLTGALPEDYQQLRGMNSFRLSDNRMSGTLPSVLAAWLQISSFRVDNNRLTGTFPSEYAAWQQIDYFDAGNNSFTGSLPPEYANWTQIMSFYVNNNFLSGTLPPQYGNGWMNILVMTVQNNSIIGTLPADYSLLAAVSVFNVALNLMTGALPSQYGAWMKVSQLYLHGNAFTGSIPLSWCTGMTYLQVFTVFNNKLSGTIPLMTFPLLSTLAMSFNDFSGTLPTFASLPILTTLDVQNNTKLSGPIVLPKTTSMISSCGTQLCMDQKTVFLQQVCLPSGVIATAIGAQPATIVALLRLCFVLNRIMRRHHYVGTVRSNLTTTTTIKQLRGTKPNSNI

SEQ ID NO: 2854 - protein, 875 aa, Bodo saltans
ICTFSFQATHLLGGFRRSTVNLRLLQYFYVYTNFLSGTLPASYSAWGNSITQFNVQDNLLSRTLPEAYKAFAKLNYFEVSTNKFTGTLPSVYSSWTALLLFNVGSNSVTGTLPVEFSSWSKVSYFSVSLNEISGTLPPDYSLWSFTNHFSVGGNLLSGEIPSAYGSWLAVAFVDLSGNALSGTLPSGLEAWGNSITEFRVNSNSISGVLPGSYSEWTNITTFVVYSNLLTGSLPLEWGSSWRLLTEFQAYANHLSGTLQSSYTATEFCHSLQRLDLRINKFSGTFPLQQMLNNCGKSLKNLFLSDNAFSGNIFQGVDSVNGLSGLQLLYLGNNQFTGAIPNNEALAMVMPDIRTFQVYNNLFTGAFPIVPVAWWANLLEFQVESNQFNGSIALLDEEVARVIAVRRSTTWSCSVELFTIQYNKNVSGPLPSALASCVNMTNFQALNVSISGTLPDTYGEGWACSITYVNLRGTRVSGTVPSSFARWSLLTFFDVGDNNLTGNAYFVNSWRQLQTLRLTNNSFEGTLPSAMALNTNLTYLYLNSNRFTGTVDPDLGMGCLLMTHFYVFNNLLSGTLPSSLSAWQRIQRFLVYNNSFAGTVSSEWAKWGSSIIQVHLARNRFEGTLPPQWASWSSITTFLAIENEFVGTLPSSWSQWSVAGSLSLDRNSLSGTLPPSWASLASIKLLTLGENQLSGELPPVWGRLTSLQVLALQGNENFTGSINSLLLPEGNLVFPFILLYCQTGLYGTSTRVNSVCYPCVPNDIDISNFGNNLAALMPFCRAAQTPPPTEYSNVTTLTPLPSPPGTSSRDAVGASIIGTVGVAAALGGDPGSAQILLSKCMCHSDGGSLSTTSENADLSNQYTLLQCLQSVSRRAN

SEQ ID NO: 2855 - protein, 318 aa, Bodo saltans
EILLSQQSNFWNSPRSFSSIVEFVVFGNSLNGTLPSIYGSWTNLQLVTLSTNQLTGTLPPAYSNWTKLQRFAIFQNSISGLLPRTFSSWGKLTEFSCQQNSLSGTLPDSYGGWTSLTTFAITSNSIGGTITPAYQQWVMLMTFDAGNNQLTGTLPAEFSRWGSQLKVFFVYNNQLSGRLPPAYSNWTSLSVFWAFSNRLSRALPEPYGAWSMLTEFQIQQNSLSSTLPVSYGRWTSLTTFAVTSNSIGGTLPPVYRLWTMLTDFDSGRNLLIGTLPDDYSQWGSGMKVFYVYNNQLSGSLPRSYGNWSCCLLYIPILS

SEQ ID NO: 2856 - protein, 1166 aa, Bodo saltans
MTLQTLLVLILTQLLLSLCVLTSQCTAVGMCGCEHRYSLLMDLYNATNGAGWANNSGWSMTSALCNNGWYGVTCDGSDVTVVAFHNNNLAGTLPLSFWNLTNLTTLDFGVNALSGTLPLQLSSLTRLTALYLHANSFSGTLPLYWANMTQLMYLFVSYNSLSGTLPPEWSSMTQLRTLSLQGSRLSGTLPLEWGDMTQLSELYLYSNTFIGTLPPQWSRMAQLSVFYLHQNKLNGTLPPEWSNMTQLTSLQLYSNSLSGVLPSAWSKLTLLTDLQLSTNSLSGTLPPQWSNMTSLSGLTLHYNALSGTLPSEWSKMTQIAVLDLFAAGLVGTLPPEWSSMQKMSRLYLQQNLLNGTLPFQWSNMRLLSVMDVSYNAIHGTLPPEWSSMTLLTTLNLNSNRLSGHVPFQWRALTAIASCAVGMNCLSGMVPFTLRTTAVDTCGTKLRGGVNVTTCLGQSWPQFCSLSLYSASQTTSFSSSDAVTFSQTYTSSTSVSNSCTKSLTMLLSSSAVGSVSTSMSHEPDSLSSSSTRTVSSSQSRSASVSTWECITANDTITLSLQPLLQAVEQDDAVVLLSSSDRHILNVTRASLPILLFITLPPIARSVISTAPLLVFNVSFESALGAAAVKHWIIGNVTISDAQQEQVNTTVFTSNTVPWVAVVLHPPFFFFPKGGCCGSYSQVTSVLSGGVASGSSLARVMTVRSMVLCDADAAVSGGVIDLNLIICDPSVQGGSLVDARSAIVSNIVLVAAVTAILLLFAALCTRVSRVPYARSLRTFCLPSSLLPLFAMVVPSMTSSSVLLLARVNISACAGVDVVLAVVGLTVAALPCCGFLALLILNVRSGMWRCEQLRSLTDNDDDGIRSSLANPRYIRIMWRRASRRSHEWTSDKEVGGMESARVVLLEYCDLRYGALDSGCLVAVACLSVVSGLGGSEAQCRAWSFLAMLLLLAQLVLLVVLRPLTTVVSMVHSFVTLALTLLSVLSQLVFVWGYIADASGLWLVEASAVFSLAVVGVSAVKMALDLTALVFAVKRRLMPLCALLANAERPPHQEHSDVCVGINDTLLHQEMMMLAAPPQHTVESDTQLPLEEDFFVPLECDKEGAQLESYSPAATTAERGNDQLLHLYAYEDDLSSHSSTTLTRPKAAAADITWKEGEWKTVVEEIMERH

SEQ ID NO: 2857 - protein, 881 aa, Bodo saltans
MGKDTPTSSPHWSVLVLSVKVTLLCAGILSVAVFPLARGAGMCGCEYRYDVLMEFYNATDGSQWFRNDGWGSLNPCSTAWFGVTCGTCDTCGTQNDVLSITFNSNSPFGTLPESLGNLSNLEQLTLKVVPSGGRCLSGTLPQSLGQLANLQTLDLSYNCLTGALPVSWGNLPRLQTLVLNSNDLSGTIPAAWSSMLSLLTLDLSSNALSGTLPASWGNMNFLVTLYLDHNRLSGTLPASWGSMPSLQTLSLPYNSLSGSLPVFGASVLSLVTLNMDFNRFSGTLPASWGNMSNLVALYLDYNMLSGTLPVFWGNMRSLVTLSLYYTSLSGSLPASWGNMTNLQNLYLDSNSLSGTLPASWGNMNFLVTLYLDYNRLSGTLPASWGNMKFLRTLGLNSNNISGTLPPSWVNMPNLVTVYLYYNNLSGTLPASWAMLNLETFYLYSNSLSGPLPASWGNMLSLQGIDLSNNNLTGTLPASWGSMLGLHELHLSSNNITGTLPAAWESIPNLVELDLSNNNLTGTLPVSWGSMPKLVELHLSSNNLSGTLPVLITLATLDMSYNRLAATLPDSWANMSSLATLNLACSNLKGTLPESWRNMSNLANLYLNSNSLTGTLPESWRNMSNLANLYLNSNSLTGTLPESWGSMTRLQTVHLSSNSLSGTIPPWGNMVNLVTLRLSSNNLSGTLPLWNEVTTSLATLDISYNRLHTTLPSSWGTMTMLESLNITGNTLYGTLPADWGKLSKLQKLHLDANSLSGTLPSSWGDLQNLQYLDLSSNDLSGTIPDEWGRLGYNQSYRAHLNISFNMLSGVVPRLIAQLNRVCLNIFMTNIRSELTLMNNWTCLFVVSHTDSRLRGTASISSIQSNTIIQSNTVSAAPLVYQI

SEQ ID NO: 2858 - protein, 733 aa, Bodo saltans
METGCESFMSTCTRTIFLDVCLLRIKVGKSSTFFGLMEVNFSLRPCPLRTKVGREFQRLSSTTAMCQVQFREYESWQQLRWFVASNNRLSGTLPPQFGNVATIFRFVASNNSLSGPLPSSFKKWSIVDGINLAFNNLTGTIPADWGGEMKVLTTLILPSNQLSGSIPLNLLTKNSLVVLMLGYNQLVGRLSSSMNTNLVVLDVQHNVGLRGSLPKLFAFSFFRPIVTTCGTGTCATITTALGLCIPRDQFPAFIASSQSPINIISGFYEFKQNVSCHPSVLTSTATRDLEYTTDGNEEVLPLLQAAAAPKAFVAVATLLDPLSGVALIALSSGRCASDTQREVASYNRLLLSPFYALGPGAAVLGNIGLCATVLLLHYGCVHLSGVTTCAGVQRRRPLRTSKNRTTPPTLAARLKFPHLSITLVLFLSRGIAFYGATRFAAAIGEDNFDDYIPTSGSLAIGVVLISCILICSAWAVGRHRIDPSMNALHFETYRQKTLRRLRWMPPWMLPIGQWKPDDARLRYGALRGPVAGGSERLSLLTESVSIGNALLAGAVPGTKWGCVGQALGQCCLLIAASLSVILLRPMRVPLGGHLLCATWIVQVGLNVCMVAHRVWDSDIATAIALVLTTVHTVTGILSASHRIAIVYWERRESVPSDFVTSEDRTKEVSPPLLITQQLHKGAVTLRPPTRRSLGTTAKQHTSEEVECLLLRNVEDISRRLQKLIELCCNRRDI

SEQ ID NO: 2859 - protein, 996 aa, Bodo saltans
MMDVSNNSISGTLPPEYSALSMNQLSGSLPASYAAWPQINSFQVSQNRINGTLPSEYANWSVAMNNFDVSDCNLTGSIPPEYGNWTSTNFFTVQRNALNGTLPFTLGMWTRLGMFDVSHNDLNGALPSSFAGWMAPKSVRVSWNALRGTLSPDFSAWGAELIEFDATHNLISGIIPVEWGRTWTGPTAVSLGNNCLKGWVPDDLAMNAAVVEICNTRVATSLSPNQVVCPAGLLNAWPPACVPEESFSITASAPQLCLPIISFDADDRAAGSVLVNDTFISVPPTDFNTLSSPAAVVVAIVRVTQDNGAHFYPRRTRTNSTTTTPAPSAPTSIIGSSSEEYRLTVDILTLPISRSVFKSAPVLLVNVSVWHALPLRTWDVSSVVSSWSDDSSGDKPASAPLNWTVLAASAAATPSSSSLSSTYNSSSSWQVLRLLSPTLDERQGGGGWLPITTPPLVSRVVKLRIAFSCGDEEVLDVNLLIPAPGYPQQLASQVEAATRYSQVASALAGGASSGSALGRVMAIRSMVVCDANAAVGGGVLDFDLHLCPSSAETDIARSAVVSNVVVLACVFVFLLLLLSCVWAHARGVSLRSALLVFSMPSSAYPACVAVLPSTAAAVALLIARVNSSTCVGLDTVLIVLGLVVVVGCPSALLALWTIRGMRTSQQKWTCQKRGGAVLRIPSRERSNNSATTSSILTAATSRAALCLHGALGPVLCRSWKWHRQGNPTESSTTTTGDSNMMKSVWVVLLEYRVLWFAALDAGMLVVIAMLAVVSGLGGASSSDVCQSTTAVVLVLLVAQLLLMVTLRPYRTLFAVVHGAVTLVLTCLSVGAQLAFIVSSFPADEEDSRTNSVEGLLWLVNASAGCNLAVVGVTAVKMLFDVKDLLDAISRRLRQDRIHHSASSLLSPPCGTGEGLPGVLLPSPTTPLESSILSLATIEEDECRGASPTASLPTMMIAMDDETFEDHFGNKKFWDVNGNARREQHQQHQHVDSRDVD

SEQ ID NO: 2860 - protein, 453 aa, Bodo saltans
MGNRRYQRWKCRSVATMGLFAQAAWPALLIIANLTPHAISCGCNYRYDLLMELYSSTNGAGWLNNSGWGTTTTCVDNWYGVTCDGTDVTSLILRNNRLAGSLPSTPSSWNLSRLMNLNLGMNPLSGTLPASWSAMSSIRQLYLDACSLSGTLPSSWSNMSNLIILYAFTNNLEGTLPPSWGNLTQLQQISLPGNRISGLLPESWAQLRNVQYINVGNNAITGTIPPSWFTLPSLQQLHLYANRLNGSLPAAVATPALVEAWLFGNSLRGTLPDSWSQLASLVNLDVSSNMLNGTLPPSWSTLTKAQVLFFGSNQLTGSLPNSWWTLGSLRKLAVDQTSIVGTLPASWSAMSSIRELYLQTSNLSGTLPASWSNMSNVIILAAFANSFEGTLPPSWGNLTQLQQISLRSAPRVMGSVEEPSVPQRGQQRHHRNNSAIVVHPTQFAGIPLVRKSP

SEQ ID NO: 2861 - protein, 738 aa, Bodo saltans
MQEKCLVALSLALFITTQWCLFAFVASTQETDRDALISFFHASNGLTSWNAARRWDVSNASSAACVNWFGVSCNSNQRVKKLNLDKTGLSGSLSPALGSMAMLEVINLQQNALSGTLPISLINCTQLLELHLQDNFLEGSFPREFSIWSRLTIFHMSNNSFTGSLPSEFNGFTSLTSFEVDQNNLNGTLPEEYSAWSKIKTFQVFRNRHLTGTLPASYGTNWSQVTKVLIYTTDISGPIPNSWGAGMTSMEQLQLFNNKLNGTIPASLGSLQKLAYLNLALNALSGEVPWTALSNLREMVVIGLQDNPFLTGTVPLELNNALAFGSAAVSICRSGICGPQLPLLLFEQHSSVDTTTMFLTFSSGKFDHEIPCSTPQPTAPTAVPSYHPASDSSSLRTQTTITASLVVVSQLISGAATSSGGLHAMQGLLRIQRLRALCDSANDSLSHGSEAEEATSCCDISTSPLQLSIDVDDNHNSVGEREAGALIGNTMFVLVFGVVRVIGSIVVTKWMSKNKRAWLTHGAPGIRNKTSNDSTQPFYSKVLEWTTVMFESFLFSRNLSSFWPSYCFSLVAKMRFLLQFHFVLCGMTPWFAANFTLQCNAQMRKAARPFSFCAAPPETKGGRLLSSSASWWKRTKAYLLLPTEDLRFVNHTVAKAVERDYGALFFGFRSSRLWSFNVELLFGVATGVVIGVTLDSSDPCGVFVFGWILVALSLIECLLAFSVRPYCAAVDFVMLAVV

SEQ ID NO: 2862 - protein, 36 aa, Bodo saltans
MGWIDAGAGGNRAHRHSDDVMRWGACVEPCDHCACA

SEQ ID NO: 2863 - protein, 1448 aa, Bodo saltans
MRFLHTSCTSCISITCRSPDHRSDNKVCLFSLPFIVVSNLFISSIGQRVGGGIVRREKNYRSHKNCSQDEKRQSTFTDDTHAHTHKMQVAQSCLVSTILLVMASVPFTRAQCACDTASNRATLLAFCTRTGGGASWAVTTTLPICSWGGVIVCGDDNNGAAVTQINLNGRALVGNLSTSPPFSFLSFSSLTLLDVSQTSLVGTIESFALPTSLQVLRLASGFTGRCPEWGLPNLTVFSCQQCGLQGPLPSSWCNNGSASNLSSGAMWRLQVIEVTGNRALVGPLPPSWASCPLTLIDVSGIRDAGVVPMSWQDPSQPISQSIKYLRLGSSGLSGNVPVTWFTDHFPHLQELSIAENELNGSLPANASTSRLLSLDASGNQLSGEITRTFGTNLSTLRLARNHFVGALPPTLPRSLTVIDLSDNTGLTGPIPIGWSEGASAPALQQILLGGCNLSGSVPQGWLYSTVVQESLLHLNMSHNQLNGMLVPATNTSQRSTVKFLSLLDIAWNNIFGPFPIFINAFSYVDVSHNRLQGTLPQLLPVSYFDASYNSLTGTIPSAWGGALIDVLDLSFNFLSGSLAQLSNTFVKGASLVNVSHNVLSGAVPASITAAGSVVDLSWNRFTLPLPQGDATSMINELDLSHNALVGPVQNIFPLQASLISIDLSFNGIISISKNGTTFGSPTQLVSVAPNLQTLLLRNCSLEQVPHALPDSIWQLDFSFNDRLGGKGGNNNDSTTTSVQQQQQQEAAVLSGFWRWAFHLRLVDLSFNPSLAIPSVPIALCQRLRGVEFIRLSGILLPFPQIRLALVGTRVIFRGQGSQLVVSSESEGAAWIESWCETLTPSTAVSTTLVITPTTMLSPSRSAVTPTMSPTKKTRAPSISQSISATVTPTMTWSLNKGSFSSSHTDAFTMSDPSPSSSQQHTTTLTDSISTQLTMSVVLTVSPATATLPTPSASRHRVSITSSKQIRAPPPVDVSVPTILSIGASAIVALIGASQAGMVVAITQGTTGTSSLRDRCHQQQLLILSFNGTTFDTDADDEMFLANSPFTDLMDNPTTLAIPFGDRAAAGPNRIALQNAAGAVVGNFVVVLGFVTLRLVGTQVRQFIESQRCCCCCGTTATARRSKRQHPMHSSDDHNQHSEVLQAGTQIPGGLMGIFLILLFPSVAAVVFLFIESASSVPSASKIASLVSVGAAGCILFLGPIIAVAYHVYTGRCLACTTGGIDDSLSLSLGVVLCSGVVLGAALSAADACAAVVWGGVLLAALSGGLGAAHALLLPTTARIESVSIALVASLTCAAELALAFSSSNVGQGISLAAAVLELVLVCVGFLIDVLPRFCNLFPQPLVQAHKVPKELARALRNVVHRGRAKTITSQQEALMSLVELAAFSSRNACRSARNGYDNSYLPAPAYSSDADSITPLPFSSQNVHLQLQLLLRHAIAQRAEKNGSRLTA

SEQ ID NO: 2864 - protein, 288 aa, Bodo saltans
RAIVFCERKTVRVPCTPVCGNHWCSTALVPPTLLAERSQHGGATTNSEHHHIAEVLTRCRDLHELHYIDFFFPATVDEKIINQIASLKQLRRLSFRGSQNISNYHVTLITLLTTQLKHLDLNSCPLITDVGAASIASLTQLQHLDLGGCFLITDAGAASITSLTQLKHLDMRGSSITDVGVASIASLTQLQHLDLSSCPLITDAGAENITSLLTQLHHLDLSGDRITDAGVASIASLTLLQHLDLSGCKVTDTVAASIASLMQMQDLDLTVCRITKAGVERALRRCRR

SEQ ID NO: 2865 - protein, 556 aa, Bodo saltans
MLDVQDNTQLSGPIVPALFTSTKRGDAVSGSDLYVCLPDKGTIENAGATSALALITSDLSQYSFAPISCSATSLAPSSVAPVHSPTNSSHITPIDLSPALQSAMASVVYAALLSGGAGTLGRGSVPAIQRASASLRLAARCNAALTATNVTASYNDGNTMFSDLADNPLGVSIPVGAVDMSAAGGAAVMNGVLVVIIGATLHACALLQRCVRHRATSMLVKHRTISTTVVSDAAHTSASLLPASRLPGSLAVPYETLLQPGIGACVTLMVSSARTPASVACGVIVSIVWMLLPVYSVFAVVVRGGRVHDGVFALRSVSVGDTRQTKTSRRHPPSAVARALSAVQRAHRYATHATARWTVRTAAEMRAVKQYRRREEKYQSSHREYASYLLENMEAVFGGYIGGREWYFAVDWGVALVGGAVMGGAEAASYDGDACGAAVWGTWCAVVLGVVQVGALVALRPNSVRLELWSGIVLGLLGLLSVVLSLAGSDGAAESIAVVASLLALVLVVVLSVGTLAGKWMGRMEMVDSSTAAQEGESGIAIGDVKVAHRKRAISA

SEQ ID NO: 2866 - protein, 1115 aa, Bodo saltans
MTSKTETKRVRVYLSIAKLTLMLLYSSLISLFVAPTASAATTCACVHRSDVLSDLYRSTNGPFWTTKWNVLAADFPCAQPGVTCNDTISDITDLVLVDFGLNGTLPASLGNLTALYRFDVSTNALRGSLPASFGNWQRIAHFNATLNQLSGSLPPSYSAWTRMVLFLVFSNSLTGTLPPDYGKWGPTTTVFAVNGNQFNGTLPPEYSNWTTMTSFVVYENNLTGTLPDQYTSWLNSIQNFNIRNNRFTGTLPAVYKVWNTPFAVHVSHNAFHGSLPSEYGRWRSIVEFSVANNNFSGTFPPSYGNFSQLKQFYINDNSFTGELPLSYSAWNNINTAHLFNNKLHGTFPPEYSQWRSAIKTLDASRNNLSGTLPKSYDNWTSMVSFTVALNSLSGSLPAEYSAWTSLQTFKVYSNQLSGTLPYGYAAWKNSALEINFSNNNFSGAIPSSYIQFLSLSTFAASLNSLSGVIPPDLVAVPTMRYFSVGDNQLAGLLPATVSPLMIFFDVQNNSGLRGALPQTLSASMVMTCNTQITCPTTVFKYCFPHEFMIAFWEIPRAEILVASAPHRVAACSATPAPPPTPGPPVQLTPSLEAPFRHVSTRFDTFQTATAALTYGVLVSTVGRGALPSVQRSTSALRLARRCAADSAGGAAQSEDLPPPLFDSPADNPLLLSLPAGVGKGSESLDFATGAVVGNTIVVIVSAILLQCIRVTHLCFSGEANRTLSNRILTLLLGCLPSARFLGGMSVLYAALLQPTVGACISLIVSPARDARSIACGALLLILWIAYSIVCVYFVLVAGRRVPTPSTRAHAGRKLFLLRAVETPSAPMKQKNKEMRKNARASLLNIRALSVNALKFLFTSSSEWVVRQGQNRRSVKNDEMLERSRIERFLLRNLINVFDAYIRRREWYFLVEWSVGFASGAILGAAEALAATADDSSSSSCDIAQWGVACAIALGVVELVLCAALRPFAVRMDTVSVATIGVLGVTCSSLAMSSALLDESASVGVVANVLALVFLVLAIVNGVHQTASRDTTGMSSNSPEPSEKIEDTLTKSKKVESSKRSVLKSPLLLESDIFIPAAANYPKYSNMRTDRHKTDVLYNLIQLVCDSKAAQKSFRV

SEQ ID NO: 2867 - protein, 389 aa, Bodo saltans
MSFLRLRNNSFQGTLPAEYSKLPISQFDASSNHLSGTLPLQYAAWKNAQSVSLSSNMLTGTIPASWSEGMPSLQSLLLYNNSLSGTIPSAPPFPSLNDFSISSNDFSGPLPSPSTWPLLFLLDAQNNTQLTGPIALQQLVSFVSVCGTELCSAAAFTGTFVCVPGGVLANAIANGVLALDIFVQLRAFAESPPSCSTTSVAPSSISPNQSPPLPNSSNIGSNYVPAIVQSTLASAVYATALGGAGTLGRGAVPALQRGAMSLRLAARCNAATSIADSAADGGSTMFSDLADNPLDVSIPVGAVDLSAAGGAAVMNAVLVVVIGATLHASALLQRYARVRSHQRAMAEKNELPASSIASAVMSLLPASRLPGSLAVPYGTLANIYRQAVR

SEQ ID NO: 2868 - protein, 1220 aa, Bodo saltans
VCTFAGVTCSSGDVTGIELAGSRLSGTLPERLGELHQMTHFNISGNQVTGTLPRALSNWTMLVQFVIFNNQFSGTLPPAYRTWAAITTFYVAFNQFTGQLPIEYADWGQGDGLPTGPTGLGRYLWVNSNRLNGTLPPEYSSWADSVAHFDAGDNHIVGSIPAQWKSWSRIVFFSVLNNNLTGTLPPELSNWTWMSAFKVGGNRFVGTLPREYAAWGSTVRYFWTDRNHLNGTLPAEYKAWLIVSELNLDENEFHGTIPVEYSAMGSIPAQWKSWSRVLFFSVLNNNLTGTLPPELSNWTLMSDFKVGGNQFVGTLPREYAAWGLSVRYFWTDRNHLNGTLPAEYKAWSIANELNLDENEFHGTIPVEYSAMTLLASFVANDNQLSGTLPDVFGSAWKLVRLLAYNNKFTGTIPETFSQWTQLTSLRLSNNSFSGTLSPTFKTWSQILVFEVAYNRLEGQLPGEYSEWSLITTVSLNNNLLSGTLPERLGPGWQNILTLTAHNNTFLSGTLPTSFSLWAKVYNVYAGNNALSGSLPDSWASGMRSLLVLFLDNNKLSGTISTAFTAFSSLQVLNVAFNNLTGQLPSVVKWPGIYLVGLQGNTHLSGSIPLSWGVQGVFSPFIKIFSVCDTQLCGNASDLNFPLGFRCFTQEIVLGDITSNPFALLGLINDASFPEMSYSCPVPPPPTTPALPSPPPIVNVFDGTVKASIGTARAVSVYSSIVLTFVASPGVQTGMKMSLLQGALTASQLSRLCIIQSDDSDDDVTLTSFVDAANNPLGLDIYVGIDNDDASSLAAGSLVGNTAFVVGFGALLEVFSRVKKFIDVSHVAMAKNFGRVARTLGWTKRSSSNSHDEVTLLPATAATSYFMFLQPTVMNAIVLFGIGGGAALGISISIFTLWVGTGVWVVWTLRTVLVVTTPNIIVLFKIFPPPLSSDTKRRFLSPAAVSSTGTRRLSEAIKYIGTPLGEWVVPTDKKVAPTDKKVVPTDKKVAPTDKKVVPQPQRRASQRFYSRFSEFFTPYAKHHTWFGVVDVLVIGLSGAAQGIAVALTTRDPAHYACPSFYASTCVIMILAIAQMIACVVVQPLCLKLDIVILSIFGSVALLSEVLSLAEEPDAADVTATVGFFLQTVIALTIPFLTSHGEGTTINKLLVEDDAAPIPRNQLDNGDLSGRRHAPREVRRITTPCLNEPKSHTAVQQITGTQLGNLVKLLSMVAASKRGGKN

SEQ ID NO: 2869 - protein, 977 aa, Bodo saltans
MMPSAARMTLFFVVIVCWIVSLTIMTVNASSSLLERSALVDFYHATNGPTWAISTGLWAVADNSSNYCSGAWFGVQCVNGSSGVVSLSLINSGLSGTISTSIGNLSLLETFAITNNRVAGTLPDSFSFCTRMSVLDIDTNLLSGTLPSSFSAMQHMTRFLVLNNAFTGTLPTDYKAWTNITRFAPQNNLFTGTLPREYAAWTSLEAFDLEFNSFAGTLPPEYGPAWQALRYFTVRYNNCSGTLPLSYGNWTRLLEFMVNDNPLIEGTLPPEYGRGWQSISQIFIYNTKVSGSIPNDWGMMKTATNVFLFGNRLTGTLPASVGNMSKLATFNVALNSLSGTVPFESWSSLRSIQAMVLQDNPLLVGDVPATSAWNIFNMSSGLPAVFSICRTNICGPQLAVLALYGGYMCVPPGNLSLLSSVTLTTIPLLFGVMKTSQTVECSTGTPAPVAHQRTKTVSHAAVVPVVAYPPFTSAAAATSKAASSVIVSIIALQQLVPGVSNAAGLRMMQSTLILQRLRQHCVSPGGGGGSGGGSGDDGNSATTSSSTDVAGDDTLCCDSATSPTQLSIPMDYANDPLAGAIVGNTFIVVVVAALRIAGQFLVWRFLSSMAESKNDANSPKKDSMAQKFIFKPIRSIFESCWGVALIWPMFTVLLTPTVTVAVALLVIGKTSGVAFGVAFLVLWLCPWVVSTYGVLYSGAPRPSPAVNFKRRPLPGESRLLRVRRYVLEPKEELVLPRGGSRTFIQNFGPVFAPFRAARLWYFNVELTFSLINGVLTGVALGAPLTDICTTILVVGWLLVAAGVLECLSAFVIVPYSARIDLISLFVVNGLSVLSQVLALIDDSDAAQNASASIGVAASMFQLLLTIALTIDAILTSVLSTSGSGSGNNSGERVMRGITLRKEVQLGCSRPVPQNNRRRHDDRDGATLMSLSSSELKSLAPFSTFFEFPDSHAPHPPLYGNLESLIQAICKAKRKSQK

SEQ ID NO: 2870 - protein, 1207 aa, Bodo saltans
RLTGTLPPEWENIKPLALLSLAYNSLSGTLPPEWTGMHQCLTTLHLNANSLSGTLPPEWANMTNAFDLDLSSNRLTGTLPPQWSSIKSLTLFSLSYNSLSGTLPSEWSGMSQSLRSLSLRGNMIVGSLPAEWSALTQLTIIDLASNSLSGALPPEWSSMTKLTTVFLYTNSLSGTLPPEWSSLKLLVTLSMGTNQFTGTLPSQWATMTQLAYFYLYSNSLSGTLPPEWSNMTALNIFDLTSNSFTGSLPAEWASMTQLTTLYLRSNSLSGTLPAEWASGTLPAEWAGMTQLVYFDQQFNSLSGSLPSHYVSMIHLRTFAMGSNRLTGTLPPEWSNLTLLVTLSMGTNKLTGTLPSQWATMTQLAYFYLYSNSLSGTLPPEWSNMTTLNIFDLTSNRFTGSLPAEWASMTQLTNLKLPFNNLQGTLPPEWSNMTSLMNLDASSNSLSGTLPQKWASMTQLTTIYLRSNSLSGTLPLAWSNMTHLVEIDVSTNGITGTVPSEWASMTQLTNLKLPFNNLQGALPLEWSNMTSLMNLDASSNSLSGTLPQKWASMTQLVTLYLRSNSLSGTLPLAWSNMTHLVEIDVSTNGITGTVPSEWASMTQLTGVALRSNSLNGGLPPGWSNLTKLIVLDVSSNRLTGTVPSAWASMTKLELVALRGNSFTGTLPPEWSSMTRMTILDVSSNFLTGSLPATWASMTQVTSVYLYLNSIAGSLPPEWSTMTQLTNLFLQSNSLSGTLPPQWASMTLLTQLELQSNMLSGTLPPEWSNMTKLVILDVNSNRLAGSLPAEWASMTQVVDVVVRTNSLSGSLPPEWSGMAKLTLLSASTNHLTGSLPAEWASMAQLKMMFVYQNSITGSLPPEWGNMTKLTNLELWTNSLVGPLPIQWEAMTSLTTLSVRTNCLRGAIPAYAKRVTLDTCATKLRGVGMSGFCRGRPWPRYCQWLTTVTATLTRSPPSKTHANEVIETRDMDSLTWSSNATVTTTATNQKLSSPSSSRTTTVRSRSRSVSGSMTHKVDESMPSSPSTSNELSASVNPTTVSQQCGALNGTNVNASLSPLLILNSSINQHDVVVLLSDQNEAVNTAIDPTTGVPTTSINTLPVARSVLSTAPLLALNVSFQSPSGAVVVHWVIDHNNVMVDGRQVNATVDPSNTTVIVLMQPPDGGGGDSGWLDASAPLLLPQTFGITMTALCDGGAVLVADYSARGWGST

SEQ ID NO: 2871 - protein, 520 aa, Bodo saltans
MRPHEVLSTTTSMSLSIVLGTSSCRKSVHVVFVAIFLIQVLVMHPTAAGAGMCGCEHRYDLLMEFYNTTNGSTRWRSRTGWGTTSPCSTSWYGITCNDRDVTIISLPGNYIQGTLPISWWNMSSLWYLYLYSNSLSGTLPVSWGNMSSLWYLDLSTNSLSGTLPASWGNVSNLLQLYLSTNSLSGTLPASWGNMSSLRSLYLYSNELSGTLPSSWSTLLCRINVSNNCLTGSIPTIFSAATSKIQWIDVCNTGVWPRNFSQKIVAMCTPNTIRRCITCDSPTLTADIASLSRSSRSQSMLASMSRSAGSSPSLTTSLSLTSKTTASKVGNSMSMSSGSSPSLTTLLGTLSRTVTTLTLSSVSLSCMSPTLSCGTIEVKLVPFISVVAVAPPFMFVDIVSPDAGNEALGSAAPHVIVVHAIDRAELLQDPVVRMNISLMTQAFNTKRWDLANITMTGIGPLLFTIVNRSDDVVPMRWLVVLVDPPTRIGGWVTNSVPLFVDATFSMNLLFSCDVESTLSVP

SEQ ID NO: 2872 - protein, 85 aa, Bodo saltans
MTNLDFFSVGWNMIHGSLPQEYRAWTKLSYFAANNNSLGGTLPLEYASMTQLRTFMVEKNFISGTIHQTIQRGCTCHILTLTRID

SEQ ID NO: 2873 - protein, 998 aa, Bodo saltans
MIIINVWLLILQLFNDATGGASWYTQWSGSNMCVWAGVTCNGGAEVVGLNLTNNNLRGDFPAGILSNLTSLRVIVLGGNHLTGSLSAGLATLTQLQKFDVSSNSISGTLPFELGVAWPALSEFRVHNNLLSGSLPPAYSKWTSLLYFDVYFNELSGSFPDSYSNWSLLSTFYCYDNLFTGTLPASYRLWMQLLSFNVAANQLSGTLPPELASWVRLTSFEISTNNVSGTLPDSYSAWSRLGNFRVSYNSLSGPLPASYGNWSLLSYFNVANNNLSGTLSASFGRWTALQTFNLGSNRIGGTLPVEYGNWASQLKVCYVSSNLLSGSLPSTFGNWTALVNFSANGNRLSGTIPASYAQWTNLQFLFLSGNSMEGTLPLFITEFWSSIHTLDFGNNLFTGTIPASYSMLNASLVQLFLQCNRLMGTLPDTFGAMRMLYTLFFAGNRNISGTLPSAWGGSSSTLKLNALVLQNTSVSGPIPSSWSSVMQATGSVALCHTNLCGGAGGFALTLSFCVDDVAACNPINQSFIQEHMTLYSLTSLPSCSETQPPSSPPLTSTTTPPTTMLSTTMIPTKMLPTTKLPTTMIPTTMLASTNLTIISVKQTAVAIASAPAGLLTALAGSATLAVGVVRAGASMRLWSCGDGADLDVLAGGYSAAYCFVCAIAACLVLRRRRSLEIRWNEASEQLGLPGQLWVVLSSIVFPLVEFGLSLILLSRGGGSGEVLLGAASLSIGTMSVAWFFSTMTWRFRAVWRTDGPRRVRTAPATSSLLNTWITSRFIEYDSQRIGCWVDAISPRYSHQSSFVECNGAVFEEYGNRWFVLWENGLAASLSVLSAVSRLSSSACNAVQIAGAVLQMCGLPVPVAARPHLKLKALLLAVVMEACGFVGGLCLLVSATTLTDGDPWGDAASVVLQIQLFAGVALLIVSGLHTGRIRDALRRWFGLQVGPSSPPLFSQLNPQTLMHNSRGGPRRVQRNRSVVPRMSSSEDRVVRVKSCTSDEA

SEQ ID NO: 2874 - protein, 1084 aa, Bodo saltans
MHAQLPRTIYLTALTSFFLAHAADTTCYCEGALPALKALHDATNGPTWSNPWSGNLSNASDVSVCSLSGVECLGVVDASGNNGLLSIDLSFRNLSGTIPSSFAMLYPWVNYFHMTNNNLTGTLPTSLSLFGKHINEFVFASNADLSGTLPPEFSNWTAVTVFSISSCSFTGTIPAVYANFTRITSFSVQGNRLTGTIPVDLASWSWLNTFIISSNQFSGTFPQLALTSWPTMLAIELSDNKFSGTIFSEALCTSWKNLNSFRCSNNSFSGTLPSCLALWGPTINLFFINNNIISGTFPLSLQNWTLLREFDCGSNRFSGSLPPEWAAMTSMTSFQVDRNNLTGTLPLQYASWTNVSRFLVNNNALLTGSIPDAYSSWGSNAIDLRFSFCNFTGTLPTSWAFDHINMLLFSENQLSGTLPSSFGGMKSISILSLDGNDFSGTLPASWSALTGAQVIGVRNNTNLSGPIPPSWSAMTQLAVLAFCFTAICGNASMFALIGLVGFGCPETSAIETFSSLATTELVAYVIQLTRVTTVSCTSPASTTHIPSSAPSPNKTEPSNASSASVLPYTAAAKSAATAAVWTVAATQGLKLSGGASPAASVAFLQGAFAASRLRRLCTANSSTSTEDSPPLSDPMDNPTEIELTDAAGNYAGGAIVGNSSLLVAVILLNQLAVFIRSWRRKRSAPSKVSSITTRAINWLVDHLVPSEGIHFPGSAAMVYGLLMPPTVAACVVIFMNSTGGSEGVGAGAYVLAALLGIVVWILPLGYLAWRMQCSPFPFTTARHAANKKARRNFSESKNTSLWRRMFSSIAEFLFTPTHTWKLLPTSSSSQVNSKDQKGGAQRAFYKSYGVFFVGTRSEWRMLFALELFIALVGGAVQGAGEGVASSGDAADACSAAEWTSATLAALSGVVLVLHVVVWPCLVRYDDLQTIVLTALTVASEIASAIGGDVGEQVGNALSLAAAVIQVILVVLEIAIALLCFEGRIRITSPFSATIPNAQPPLDFGELRLRLPRIGTDYQLPSIAHSERPVVNNHHSHDSALCASPQQHQQYVSLQQIRLKQLLYMVAAQHHHRCRSSKETKGLKT

SEQ ID NO: 2875 - protein, 708 aa, Bodo saltans
MVSVIWSNTPVADRNTTACLLFVCMIAASEFMAQHVDAACTCTYRLPLLQELYDATNGAQWVSPWDMTAVDAPCNFDGVTCGVSNDITSIVLSSRGLDGTLPPSLGQLGGLVTLKVDSNFLDGSLPPEFQNWTSLQTIDVSDNNVSGTLPSEYCLWTQLTFFHASRNKLEGSMPASYSAWEKCDQFDVSHNQLTGTLPPVYGSWSVINVFTAGVNGFGGVLPSSYANWSRIGSFNVSMNSLTGTLPPGYASFVALGEFDVSYNNLFGTVPVQYAAWKSMSRFYLASNKLSGTISNSLFGAWLSANAFSVRRNALTGTIPSTLLALTTLQVAYLGLNMFTGVIPTTISSSLLILDLQNNTGLMGTLPSRSMFVTVCGTGVCPTTSLPPQYCLSVSAAESLSSTGTSDPVQMLTELGPYSSSCTPPDALHLTSAAPQAANADNVLRNVTVTYLDPTTRSIGLAVSFVSSVVGGSGGALRGAVPGLQRATTALRLTVLCSAGANASANDAMFSDRSDNALGLSVPVGSSGLEYAAGAPIGNAMLVFAVGACLHGVAVVRERLQLLTTLAQSALRVLPTSLLPGAFAVAYGTQMQPSFGASFALVVVSTRTAQSVACGIALLVVWLAFPLYCVHRALVACRTEDGAFGLASIQAAKRRRERNGGRRHSNLRFARVQSLHEFWMTPCAEWVVPPKTTLSQSASAAFVLKHLEP

SEQ ID NO: 2876 - protein, 583 aa, Bodo saltans
MRSFIVIMAKLLATLLAIVLCLPSPCHGANTCTCESSRSALTAFFQKTGGASAWLAPWPVDIPTSSVCNWTGILCYGDGVTSLVLTDNGLTGTIPGDLIVQMPLLRNFAVSFNSLTGTLPPELSRLTNLVNFDVSYNNLSGTLPSTYSAWQNLESFSVARNNFSGALPPSYHNWTSHFEQFHASGNNLTSTLPAEYSRWGASLNTFHVVENNLYGTLPDSWKNFTNMTIFGIDNNPHLTGTLPPSYGQWTAVNNFTVMYTNISGTVPPEYVAWNRSIQILFLSNTFIGGTLPSFLGYCSAMQQISISETAFVGTIPSEWASMTLLTSLSSASNGVSGTLPAQLGQWVNMRTLSLSSNQLTGTLPPSWAGMKLLTALYLDLNHLTGTLPPAWSALVNLQKLTLTFNSLSGELPQSWGALRLQVLLLQENELLTGRVPLEWKSIFGTVPFGIGLMSICNTSICGASSSITGIYPLGFGCLPGSAFVSLLAAGLTFDQIYMSLLGKANFTSSVACPSTPATPVIESICGASSSITGIYALGFGCLPGTAFATLLAAGLTFDQIYMSLLGKANFTTSVACPSTPATP

SEQ ID NO: 2877 - protein, 658 aa, Bodo saltans
MYVSLLCTYLSLLIAAPLTTVNAGLMCGCEQRYGVLMELYTATNGPTTWANRAGWGDTSTPCNMTGGWYGVTCNGSDVTVINLGNNSLIGTLPASLSNLTSLLAFIASSNRIGGPLPSAWGTGLTQLRNVSLDGNLLTSTLPPSWGGMTLLQTMKLNDNQLSGTLPGGWSTMTSMVSLYLYSNRLTGTLPRNWSSWLHVQELLIYSNDLAGTLPSTWSQLSSLQFLYLYSNSLSGTIPTTWWAMKRLMAIVLSVNQLTGSIPSSWGEGGAGVMPLLYYVDVSSNQLSGNVPASWANLSSLQTVHFSTNSLTGTLPAAWGASRSALTVLDLEFNQLTGPLPDAWGQMRSVQQLLLSGNQLTGTLPASYSSWTGVNYILISNNKLSGSLPASWSVFRNLYQLELNGNSLAGSLPSSWSGMVNMIQMKLYSNFITGSLPPEWAALQALQVLYVNVNALTGSLPDAWSTMARLSVLFVNENQLSGTIPTSWAGMSNFAVGSFSTNRLNGTLPSSWSGMPKLQQLSVGQNNLSGTLPVEWGQCRGLQTLYLNENTFTGSLPSAWSGMTTLLHFAAYSNQLTGTLPASWWSMVSLQDIQIATNSVSGSLPDSWSSMTLLTSIDVSSNSLTGSLPLSWSSLVKLSYVNLQSNALVGTLPPSWSSL

SEQ ID NO: 2878 - protein, 1048 aa, Bodo saltans
  misc_feature (596)..(695): Xaa can be any naturally occurring amino acid
MRLLLCIHACILLSTALLMMSIAPGVQGCACTSRLGILEELYHAAGGEGWSSPWVLSDPEAPCSFVGVTCSPTLADIVSINLRGRGLRGGPLPSSLANLTSLAYFDVSTNALTGTLSPSFASWVSVTVVNVSNNQLSGSLPPEYSALPVIAEFYANLNRLTGTLPPAYGRWTKMSWFRMGDNMLTGTLPPEYSNWTIVTNFFVGNNSISGTLPPEYKSWVLDAMEVHFNNFSGTLPIDYQAWGPGVHRLVANNNHLSGTLPPEYKSWATTMGELDLHHNSITGTLPKEYGTWSVLHYFNLYANQLSGSLPPEYGAWGSDPGLNVNSNSLTGTLPVEYKNWTGRINIDVHNNLISGTLPVEYSIWTNVISFNVQSCRLTGTLPAQYAAWGSITTLGIGGNLLTGSIPPSWGDGMRSIQLFFASYSNFTGTIPPALLTAPKLQFFAIAFSSISGSLPMQFSPLLFLLDVQNNTKLTASPAIPLYTGITACGTGICPNNAFVTQYCFPEGFVAGYVLEGLDLVGLLTAAKPYIRVCSVTPAPNPPPPPPHTATLVRAESLQTVLKPVSTDTATAMIYTALVVGGSMLTRGTIPNLQRAXXXXXXXXXXXXXXXXXXXXXXXXXXXXXXXXXXXXXXXXXXXXXXXXXXXXXXXXXXXXXXXXXXXXXXXXXXXXXXXXXXXXXXXXXXXXXXXXXXXXRTMLQPSLSGCIALIVSEDRTAGSVAYAVVMLILWCALPVYCSWVALYRGRQTPNGSFLLQTRRTVARSNSERRGKSKTEGNAFVRTLALIRRLSSYCLDPTQRWCRPPPPAGYRSGVAQQTYAQQAEFLLENMEPVFGGYVEGREWYFVIDWGLTLTSGCVLGAAQALATDASSHNDRVAACDAATWGTVCALCWSVSQIVVCVTLRPLSVRFELHSVLGIGLLGFVSEVLLLLNLDDAADAVVVFANIATVIALVVLTLHVTTRVANTAEPILKRFTASAQSETKEHRHHHNRQSDATQPGKVSHNEAPHSIPQAPPSRAIREQLHRLVQLACDGKVGMDIVVPPVWPRIY

SEQ ID NO: 2879 - protein, 182 aa, Bodo saltans
NSVARFQANWRRLGLKLFKFDITSTNSTLRNLFPPSYANWTKVSSFDVVTPTPSPELFHASYGSWSNLVTLSAWNNAFSGSLPSEYKNWTSISTFDVGGNFLSGTLPPEYSAWGGIFLFSVRTNNLSGTLPPQYGAWTEIDTFRVANNNMLVGTLPASYGAWAQATQIYLYNANFSGSIPDS

SEQ ID NO: 2880 - protein, 1088 aa, Bodo saltans
MCGCQHRYALLMDLYSATNGTGWLNSSGWNATDDCNVDWYGVTCSANDVTSVFLTSNRLVGTLPLSWWNMTALTSLALFSNSLQGTLPAAWGNMTKLAALQLYANSLSGALPTSWSSMSLMQLVWLSGNSLSGELPSSWSNMTLMITLLFDSNRFSGTLPASWSSMTKLQTLNLNNGNNFTGTLPCQHRYALLMDLYSATNGTGWLNSSGWNATDDCNVDWYGVTCSANDVTSVFLTSNRLVGTLPLSWWNMTALTSLALFSNSLQGTLPAAWGNMTKLAALQLYANSLSGALPTSWSSMSLMQLVWLSGNSLSGELPSSWSNMTLMITLLFDSNRFSGTLPASWSSMTKLQTLNLNNGNNFTGTLPVVWATMSALVDLQLNGNALTGALPPSWSSMSMMQTLFLSGNRLSGELPSSWSNMTRMTTLLLDSNTLSGTLPASWSSMTKLLALYLQGGNNLTGTLPVVWVAMRALVELWLSGNALTGALPPSWSSMSMLQKLVFSGNRLSGELPSSWSNMTRMATLLLDSNMFSGTLPESWSSMIVLGSLSLFSNDLAGTLPESWASMTKLQALYLHSGNNFSGTLPVSWAALIHLVDLRISGNCLTGALPPSWSSMSVMQTLWLFSNSLTGTLPSSWSNMTQVTSLSLNSNTFSGTLPSSWSSIKQMKNLWLYSNSLGGTLPESWVDMTQMSIFSLGLNSFTGTLPSSWSAWNVSQLTIDLSSNRLSGTLPPSWSRLSIVTFDVSNNSGGIPSSYAFPALTSSSGGFNVCNTKVRGGGAGIALCVNSNSWPLFCNWVVSHSETCTDDGTSSRSKLSMSRSSISYGGTVSLRKSSSASLSTSEFLCSALINATVGSLPPIMSTVLLTSDSAVGIYTTTTTTSTRAAINDDMPTMAIAGSPLSRSFLQLVAPVALNVSLTCPPSVAALSHWSIGNVTTTSGAPLVFRTETSNVVPWSGVLVQPPADWWIDPKTPLVTATTFELTFTMVCNGSAMLLITVTVPAPGATVLYAEQVEASGRYFQVASLLAGGASSGTALGRMMAIRSMVLCSADSAVSGGVLDFDLRICVGRSSGDSGAAAVAARSAIVSNVV

SEQ ID NO: 2881 - protein, 1366 aa, Bodo saltans
MCFLILVHHCVASCACSQRASVIRTFYAATNGASWIHPWDMSSADVPCGLEGVTCDATVNDITNIVVTLRGLGGTLPDVFGDLPQLVELTVESNALSGSLPLSLAKCASLSRFNIFNNSLSGSLPTAYSAWTRLNYFSIGSNLLTGSLPKEYSAWGSSIGVFYADNGGLSGSFPSEYQTFSTLTRFRLTSNSISGTLPASYSSWTSLLEFSVGGNKLTGPLPSEYSAWSLMYLFVCSSNSIEGTLPSEYSAWSAMSVFDCSNNNIGGTLPATYSAWLAMSVFGCVNNILEGTLPSEYSRWLSLVHADFGGNQLTGTLPPAYSAWTLLQAFSVASNQLEGELPPSYSSWGSLYLFWVYTNRITGTLPDEYRLWTSMQNFDVSSNRLQGTVPAVYSAWKSLLTFLCSNNILTGTLPPEYSAWLVIELVNVSTNQLTGTLPAQYGSWKEFSIFCVSNNQLTGSLPQDFGNWSKLVQLDGIFNSFNGTLPREYSHWQHIWSFDMSHNFLNGTLPPEYNAWSALSSFGCDGNSLSGTLPPEYGVWSALSIFSFSGNSISGTLPPEYGAWTALTQFPGCSNQLTGTLPRLYESWSMLNTFECFNNSISGTLPPSYTLWSHLQTFDVHVNLLVGTLPMEFAAWSVVKYIDMSNNSISGTLPSSFFNWGVVAKFDLSYNRLSGLLPKEYQAWANIRFCRLNSNQLTGMLPSELSSWSQLLQFSVQLNNFTGSLPPQYGAWMFVVNFLVSSNSISGTIPSSYGAMQSLSVFDASHNNLFGAIPQSVLLCPQLQIFSVGYNGLTGVVPARCSSSISILSLQNNRLLSGTIPSQLSTGVALVIVCDTLICPVASVGIQLCLPSDYLFTSAPTTAEVILLIMNYKWQCVAHDNPTISPSSAEVPQRDVDDGQTSTARVVAAYVAAATLNSLVRGGGVRGNAASLQRSSSILRLASRCAASSLNSLSDGSGASMFSDISDSPLSMSLPVGSQALANAAGAAIGNALLVCVVGIALSIIQVLLHNCGFVTRTLPPPLLRILKEQLPSSKLPGSLSAAYGTLMQPSFEACTVLLVSGQKGSEALWCGVMMLCVWLMFPAYCVHAVVIAGRRNRKFVLEGVRCERRLHRAFVSSRKMPSTLWSMEHLILQLHGIRATFLDAASEWATRQATGNARCREQQRRAAKQLLDRMKPVFEAYADRREWFFALPWSLSIVGGVAFGAVMANNDVCSASLWTTVVALVIGIVELVLSAVLRPFSIRFELVVTLVVLSLGAVGSALVLGGATEAAEDVVTAAAIFELISMIVLTLHDVGHSCEKDRGQPSESPSVVLSANLVADLVVAPDIVNGNTNNRLAHTHGNSLHKETTQSARLASLVRFICEAR

SEQ ID NO: 2882 - protein, 156 aa, Bodo saltans
MTQLATFSVSNNSLNGTFPPSLKFTAATMVSFGYNNLSIPIPPCATTWPKLTVLDVQNSTHLSGSMTLPAGMFAATVCGTQLCLGADVLSYQVTSCMPAGLLYCAAQTKSVPLLLKAANDDAYSLTECSATTTAAPPLPTAAPPQQQFVVHQQPII

SEQ ID NO: 2883 - protein, 258 aa, Bodo saltans
MLVMQPSATGVQSLYLYSNSLSGTLPASWGNMQLLQSLYLYSNSLSGTLPSSWSALRCQINVTNNCLAGSIPTTFSAATSRIQWIDVCNTRVWPRNFSMNIMAVCMPNTLRRCMTSDSFTLSAVIASLSMSNESSISLTTSLSLVHARVRVRVYQLQRTTFIVCYNVLAYAFEANFFFFLCRTSTLQDNWRKRGAELSSLRRTRWWHERKCNTPKDGDNRRSRDGHVSHFPPNFGLFFFFCIFFFLFPCFFFRISYHF

SEQ ID NO: 2884 - protein, 860 aa, Bodo saltans
MRMREFVLFCVFVSVVTCAPIFSMLSQDPLLVFHEVRVELVGTFTDGYAVRLARNTSTCDSSTSFVGGVAANNVPGSTISNIVRWTTDDSPNTWTASFIPRFVVDNGVVCWSGDGGVTWQTALTANSEYYFRLWKTAPSAIAVPQTVTAGRLFRVLVFQALPRFSRGVLVMNESSCFGNSPRATLSEIARLHGSGFEFHPPKSADQAFLCVSLTLRGPWSIIPFTITGSTNRSITIFDSSVRFRKATVSCTPWIAGVRSFCTIQVKNKTLLSISPVNIHISLLTDGGGVAECPLPPLEAINSTTLGFSFTPQRSGNDGTISLEYLTNPLLIVPDNDTISHFAKVAGVVIQNLTSVRQVDVIPWYTEDLSLKKFFVQPSFSFLQHYQATNLVSYSSFNTSGDWISQFGITQFAGRRNLSSSDELISFTLNTSTRETIVQSISVPPSSEQCRLRIYYYLLAKGGTPETETFIGSVKISSSSTLFGSFNLFAYQRQVIVVQSDGRRAFGDIFSMEQIAVEIPVASTSSTSFNLNLTIDHRYVQQLYFVGPEILCAVSNTAKTNLQDILALHRLFDAVGAGSTLQKWKANGQYNGDPCTNQWQGVECRHMRVVALRMRNESLTGVLPPLRELTMLETVDFSGNKITGGFALNNSRLSRVDISFNKLTSLSTNAGVFGFSTHKCIRYFNAKNNQIAPFPSLLFLPQIRLLDLSMNEMRSTLPDFSVVAPKLQVLHLSTNHLTGSLPVVPSSIVSLDVSANRFSGSIPQWQLPKVKFIDISKNVINGTIPWIISQIPSGGAVFRAEDNFLSGLVPRLSFKLTDVRRNFFQCPLMRPEIDTNTSEMNVIVNWGVNNWCDFNTASAGF

SEQ ID NO: 2885 - protein, 877 aa, Bodo saltans
MPTRVSATTPVQILTILLLTGSALQLLPDTVSGTCSDSNAWTILEEFYNSTNGAHWTSPWNMSDTRNSLDGVTFDGNCVVTSIDLAGRNLSGTLPKSLGNFTSLTTFVVSHNLIRGTLPPQYSAWKSISQFLVANNSLSGTLPHEYMSWIKLGEFHIHQNEINGTLPSSLSNWTSIRFFSAFENKFTGTLPPEYSAWGRTRLNGLKEFSLHKNSLSGSLPPEYGSWADVNVLSLANNLLSGTIPNSWITMNLTSFLISYNNLTGSIPPELLLRPYLNVFAVSHNNLNGSIGDSTAQYLFAQNNSRLDGKSLKVSNCSSIFNPCAVAICSTQIQCPSISNLLFLCLGDGVEVPFDISKALGALRYFAGSCTQPPAPTVAPPLLLVPSPTITTPLPPYIVTPNVPPAYVPSFTPPAAFVAAISIIEPTGGVGLIALGASRCAPAAMKSSTSPGRVLLSPFYALGNSISVLGNLGLTVTIVMLHYTSVRVLMWKQLRNGQHEVSHKRGKNLSSSSNIANDIMSTVRFPHISFLCVVHLAKGVAFHGGQSLLSSITPNTTNDDFDESTTDTEDALALSAIAASTAALALIGLVISVVVVQVERRGVARKQLHFQTFRQAALHRIRWLPPWTLPTGMWFPEAARRRIGVLRGPIRNGCEHFAMLWSVVSVLSSLATGAVPGSAGGCIGLAVVQVVILGGACLVVVVYRPMRTPLGGWLVCATWVVEVCISLSLAVARSMNHTEAPVEATVVLSTLHTIIGVLRFAHRGALRWWERGLKPNDMTPAANCSPLTCNLTNSVNSDNRRLPKNENKRNKNNRGSRINLCQLMALSEDDHAKQTTHILSLGDSNLCGQHGDRNEVAVRLSTLITMCCERRAVGSVRY

SEQ ID NO: 2886 - protein, 143 aa, Bodo saltans
MRHLVPMQPHLVLTLLYFLITRDLVQCLLPDDDVKTLNDFVSSVSFKKNRTPLTSSVCSDEDWRQHISCETNLTSNTSIVTGLNFTGQHLSGTLPPSLANLRHLMSFKLSDNSLTSSIPAEYAQWGSSIVSFWVHVNSLQGTL

SEQ ID NO: 2887 - protein, 967 aa, Bodo saltans
MKQGTTMKELFYFLAACHMSCSGILQASSLQDRSALAALYSATGGASSWIVSPSWNPLDDSSDFCRWYGVTCSEGGRVTQLILAANGLRGTIPPELGNATELEFVDFSMNSLSGTLPTELSFCQQLNTLYLHSNVLTGTIPSTYASWKGSNLEFDVSNNKLIGTISEQFSSWDGFRFLVTNNSLSGTLPGSLSNWTKLIRFLVNGNQFTGTLPESYSAWTSLRQFAAESNSLTGTLPAAFSRWSTSLQEFSCQTNRLSGTLPPEFSAWTGISAFDVFDNSLSGTLPSAYSSWSSLTFFRAASNPLTGALPSSYSAWRNIQQILIYATSISGSLPHEWSQLATLNSLLLFQNQLSGTLPESFASLSKLTALNVAVNSISGSLPAAWMKLSGVQSMILQDNPSLSGNMNSSSWSGVFSPAFFMAVISICRTNICASSAITTLGYGCIPSSNISILSSLDLSTITSLMSIAVWSTTQLGPSCSGTPIPTSHIQTLPIYEVTRTATALQNLENDTGTDDVAARRVASATSIAVPVVALAGSLLGGANAAELQMLSSVLSSPCMCGGPSGMITQQTKQMSLTTSPFAQLGGPEYVVFGNLGAMITVTVTHCAAVMIVRRKNGVSPVFARSRTTSALGEEKNAIVLSSLRFPSVSIQFALFLVPGTLKATVASASAAALTTTHPPAETIAACVVGLLSVCALAVIFEVCVYRQRVLTIPLKFFSYKPQLEETNVPKKVALLCLPSGYWGPQHCARQYAVLVGGLRGRRFSHLWRLLPCANLMIQLLSSLPGNTAAGCNALLALCMFVAFATAVVWAALRPARTLMVGIMTVASLVAVAAVTGLGFLCRYQMTSENDILLAALAASCVGIASTIVSTAVGVAENVVFVPRVPPANLQSSNEAAVKSIVQQMPHNTMHIWTTNPTFSIDGGTGTASLGTESSASSVALNGLIDFICLHRRGGYSLHERENSFSLL

SEQ ID NO: 2888 - protein, 393 aa, Bodo saltans
MGHHISVQHRVVWCHLRWRRCDKNKSLGKFHRGDVAELLVEDGSTRWSSRTGWGTTFPCSTEWYGVTCDGGDVTSINLSGNSIEGTLPNSWWKMSGLRWLYFNSNTLSGTLPASWANLSDLLHLTLSSNNLSGTLPASWGNISGLLNLYLHINDFSSTLPASWGSILGLQNLFLSDNSLSGTLPASWGNISGLLNLYLHINDFSGTLPASWGSILGLQNLFLSDNSLSGTLPQLWGNFSGVRNLYLYSNSFSGTLPASWGKMSGLLYLCLNSNSLSGTLPQLWGSMSRLKNLYLNTNMLSGTLPASWGNMLDMQNLYLHSNELSGTLPSLWGSMRNLQDLILSFNSLHGTLPSSWGTMSTLRNIVLRIQQPQRNAAVSVECAALPDQCLAQLP

SEQ ID NO: 2889 - protein, 855 aa, Bodo saltans
  misc_feature (301)..(401): Xaa can be any naturally occurring amino acid
  misc_feature (607)..(707): Xaa can be any naturally occurring amino acid
MWTALSQLTSFRCDNCSLNGPLPSWGSSSGPMMLQNVSISSNTIVSSIPASWSSLANLVSLTAAASKLTGALPLSWALSPLLQVLNVNSNELTGNINALAFSVSSSLTILNLSGNNFGPSCDFVVSSTLVNLLLSDNLCSGAHPDWSSTSVKLTVVDVRGNSFSGSIADIPSVLLQVLRVGDGNQFSGPLPAVISSSVELLELSASGNLFTGTLPSFHPSACPRIIQVDNNQLSGTLPATIVTNATSMVVLDIAHNSLEGSMASISDILSTAPHLATLNVSFNRISGSLLLFDISMNQNSXXXXXXXXXXXXXXXXXXXXXXXXXXXXXXXXXXXXXXXXXXXXXXXXXXXXXXXXXXXXXXXXXXXXXXXXXXXXXXXXXXXXXXXXXXXXXXXXXXXXXSVLQVIDVACNALSGALPSWSSSASLALINMTCGNTFHGAVPLFHPNVSSTLSWVDLSDQQLTGTLTAIVEPLLLPANASNSSSASNSTLQQNSSVTPVLRVFLVGGNKFVGSMPSFLSSWPLLEQFNVSHNSLSGTLVSSDGNISSSFPSSLWSVDISNNAITGTLPFIWWNETSSSTHRQVTRLLLGGSSGAQLFDGPLPPLSXXXXXXXXXXXXXXXXXXXXXXXXXXXXXXXXXXXXXXXXXXXXXXXXXXXXXXXXXXXXXXXXXXXXXXXXXXXXXXXXXXXXXXXXXXXXXXXXXXXXXLVGSAAAWTMLDTLILHKCGFNGTFPQASLSSAPHLRILDISSNQLDGALPTDLGTTLPLLTLLDVSDNSNLSGQLPSSLSSLMTFLEKVNVSRCNFSGSMPLSWASPNLTSLDVSDNIHLSGDVSGLAFADISSLQVLNLSSCSFGP

SEQ ID NO: 2890 - protein, 1016 aa, Bodo saltans
MLVDALILVLSWCSVCFADQVVVLEDIFRSLNYQNETPVNAMNVCGTWRGIRVECDSGNFTDCSLDGTLPESLPNLTNIDFFSVQSNKIHGTIPSAYSSLGLSLRTFIIGKNRVNGTIPESLSNWTNILTFQVNDNNLTGTMPSAFRRWKQIVDFGVSNNAMIGTLPSELSEWSSIVNFDVSSNRLSGTLPDEYRNFTTVNRFFVDDNYLSGTIPVNYSMMRAMIRFSVSDNTLNGTLPEQFSVWNVTSFEAESNQLTGTLPNEYSQWASIEIFSTQNNSLSGTLPRDFSNWTIIEHFSVKNNLITGVLPSTYADWSRVKYFGASNNLITGTLSEIYNWRSTILRIFLSDNRLEGSIPMLWASLLIGLQSFSVSNNSLSGTIPAFQSQQLQVLAVSSNNFSGMLPTLRVPKLFLDAQNNTLLSGPVPFGIVSACGTQLRKQPIQFPPLLTTVCFPPHSSGLVDDIDNTNLSDLTQVISLMAPYVFTLQDCCSTTSLPSAPVTPPATSEEPVNSLAPGVSSSTKDAAAAIVTVTVIMSAISAIDASDAQMLAAVLSSPCTCQNGALSTTTSTSSTTMLGLSIFSPLGSEWSVVGNVLLCLTLMAIHGLCVMAMPKPKMNAQSDVSSIETPRPSRLTWWRNTPHYSETLDQISRLRFPNVSVAMVLLLAPGVVRGVANTSQNFANASEEKNDSSVRLRIVAIVVGIVFLACTMLCLELIVYQHIDDEMVNLEDRTLPSSSAAMRRKRGMTHHQRRFYYAPYQQIVKVFAPVPRLVALIALPRGYWGPDAARNSYGGLVSKFIERWRRVWVVLPISNLIVQILSEIEDQCSVTQSLTLCILLATCIFFFTAVPHRAQLSSYLTCLSTGLTFVVAVFALACRLEPNDVSMNDVSSVGVFASLVAMLCQVYNIALPFVEQWLLRRNGAIPLPLLTDTQSSNSSFQHTMKEVSTTKTSLPMKSARTLIHHHLAEPQRVEEEVSMRQNQRQQRQRLLALRELIELVCSTSQEPASLSQLWCVQ

SEQ ID NO: 2891 - protein, 959 aa, Bodo saltans
MNCSSLRNLYLSNNKFNGSFFNNLSSIAAEVKATNIQELFIAYNKFTGTVPNDDTLVTLFPNMTMFHIFENQFIGVMPILPVTKWKYLTEYRVSSNNFTGSNLSTFDEIVRQYQHTPTHPWNCTLKVFSMSFNRNVTSGSLPMTLSACTNMSTFEANEINMGGGTLPDDYGRAWAGSITTFSLHACNLSGTVPMSYSQWSLIEHFDVGVNSSLHGDLSFANKWRALKTIRLESNLFTGTIPDGFSKNINLTQLWLNGNQLHGTLDSAFGAGCPALRYFYVHTNNFSGTIPMEFASWPVMERFYIQNNRFEGTLQKAWAQWGSTFAEMNIGNNSFSGNLPAEWSAWGNVVVLMAAINSISGVLPISWEKMKHLGTLALDANQLTGSLPSQWSGLTSMNIMSLTYNQLSGTLPREWASLAKLQFLGLQGNANISGDIPSTWKSSLTGLFYMSICSTALYGNPWAPTLFPSPCFPCLKEGTAVSSFASAFSSVLRACALSNGSQAQPLTQAPMPTTPSTSSAASLPPPSPSPSARDAAGVSIIGGAGVVAILGGDPASAQMLVTLLMSSCMCGYSGDGGALSSGGSDDGVFATIVSSLTLSPFSSLGNAAMCFGNSVLMFGLVGLHALLVVLLGRRKERRDRRQPHSDENNAWRALCARPEASAAKFPNICVTCGLFLVPGVVRGSVMVLGTSSSSTLEMVAAVVSALLLCLYFVLVLEWLIYRVLILDDISSYSSGFCILRREALLHFEPFAIEYPYSPPLPRPVAAYALGRGGVWSPSERRNSFGKLVAPLSPGHVRWWVATPLLTVLTVLLSSVPTTSTAGCDALQGTVTAATVIAAGVFGVVRPYRAVLVSLVASFSLLVVATTSVLGLLCRHDAISVVQVLSVCSTLSYVSLVGKVYVAVLPFVEQHLLIQLYEPSRHRSGRRKELRRVLSRGSEETRCFVDETLLVPPAGTALVAA

SEQ ID NO: 2892 - protein, 1080 aa, Bodo saltans
MAFSISGYSSVAQFAIACVVLATMTDFVIGGTCFCDDSPALNTALNDMRTSLKNVGWDMALSKCTWNGVTCSPTALTSLNVCYYSNSCTGGSLPTSSATWQSIGAALTSIAISSSGLSGPFPLAASVALTKLSTFSVLYWSPAGGMQLPSGTGYAMSLYSSTITIVNSGAASITSISVASSSAVPNVSGIASLSYITISNTPFTATSFIDIPMVRSISISGIYAGTSLPSWTGTNAPKLSSIAITSSAFTSFPASWGSIATLTSISILSCGSVSSPMPSQWSNLTNLRSLVLLNTPFIAPLPETWGNMTSVTTISISGAKFTSIPSTWVSMTNLTTLSISSCALGGTLPLSQISPSVKFLSLSSNSIADTLPTDVSSWSQLITLDLSYNTITGTIPLWSTLSNLTAFNCAYCKLTGPLPQWDVTSGIQTLSISGNPINSTLPEWSTFVKLKTFSCVSCLIYGPLPAWGSSSIPGLQSISISNNKIGNSIPVSWAQMTTLASLVASTSNITGVLPLSWASMTSLTMLSLSGNAMVGSLSGLVVSSPMATLDLSRNSFGPGCNFTVPTSVTALLLNDNLCTGTHPKWTSASYLVTVDLGGNTFSGSLAPISSTKLQVLRVDRGNQFSGSLPSWSSATGLSEVSASNNLFSGTVPVFYYCYPVKLMFANNSLSGVFPSNWDPYYLQYFDISANNFSGAVPSLVSRSIISVNISFNRLSGTLALSSILSTLTYLQYFDVSCNSLSGTLPSWSSSPLISVNVTCGNNFSGVLPTFASNVYAILRSLDLTDQSLTGDLYTSIQASQSGWSLSPLTTLLLGGNSFNGTMPQFLRWANLQRINVSGSNLTGSIATSGTYPAQLWSVDVSNNGALSGTVPVSTTLNSRMQHFLLGGDGHNFSGALPSLHTIFPNLTRFSLSGSFPVTLPYAWIVGSAAWVNLTTLSLRKCGFSGTFPRPISSAQLLLLDLSRNQLTGILPGDLSSYVPLLTSLDVSMNAFNGGLPGEWSTLANIVQLAANACNLTGTLPLALSTLAPTLQALSLYGNKFVTSSTDNDLWGSLINLLLLDISSNNFTAPPQFGIVSSLKS

SEQ ID NO: 2893 - protein, 666 aa, Bodo saltans
  misc_feature (43)..(143): Xaa can be any naturally occurring amino acid
MPPATSLPSSWLHLDSRGRSLIVLDSSATWCWSTLRATQSPTXXXXXXXXXXXXXXXXXXXXXXXXXXXXXXXXXXXXXXXXXXXXXXXXXXXXXXXXXXXXXXXXXXXXXXXXXXXXXXXXXXXXXXXXXXXXXXXXXXXXXRYSNSIPATLSNWTSISRFALSNNKLNGSLPSSLRTWRSISSFFVSSNQLSGTLPPEYAEWGRDETLAAGPQGIGRYIDFSFNSLHGALPEQYSAWGDSVVLFDAGDNTLTGTIPAIWASWSRVTFFSINNNNVSGTLPPEFTNWSLVRDFKVGSNDLEGTFPVVYSVWSNLAYFWTGSNNFHGTLHTEYKAWVGTQELFVNNNNLTGTIPKEYNIMTQLSSFILNSNRFSGSLDDSFGPSWRLLVRIIAYNNSFTRTLPSSFGQWTGLTDFRMSNNNFTGVLPSSYGAWTNIVLFDVSFNNLTGTLPSEYGSWHAATSFVIFNNDFSGSLPDRYGPGWTAMLTVTINNNSLSGSLPSSFSLGKTILNFYASYNAFSGTLPESWPSGMRLLSSLFLDNNQLSGSITTAFTAFSSLLVINLAFNNLTGSLPTVVKWPGVYLIGLQNNPHLRGAIPSSWGEPGTFSVVFKILAVCGTELCGNASGLGFPLGFRCFTRPITLDNVMANPLSLLSLLTDASFSVPSY

SEQ ID NO: 2894 - protein, 1036 aa, Bodo saltans
MIGVAVVAVAMLCVMNDASDTSGSATAVRDALARLYNATNGSGWKKATGWKSQGGTSHCDWYGITCSTVDNTTTVTEIHLSRNNLRGTLPSDASFWETFANLTVLSIASNQVNGTFPNVMPAACPMMLRLNMSHNALEGTLPASIPVTAWRALDEFDVSYNLISGSLPLVYVNLSSIQQFRVNNNLLTGTLPKEYAKLTTMEHFSVGYNNLTGTLPDEYRHWVNLTLLRVEWNFLNGTLPPSYASWKKLGRFRVAGNAEIGGTLPAEFGAWTKLVEFYATGLSLQGTLPDAYSAMTSMQVFSVFNNYLTGTLPDSYARWGSSILFFQVLNNPLNGTLPSSYGLSFSNITTIIITNTSISGTIPAEWGNMKTLTVLMLHVNRLNGTLPESLGDLKLLTSLTLADNDFSGVVPFDAWSTLRNVQLLLLGDNPRLNGLVPTSFQFIFTPTSLFSVCRSNVCGPRLPMVVFGYGCMPQYVLRDHTITDISEGISIVSPRATFLFTAPCTAPISPPPHHLMQTTSRTVIDASAPHDDGPLWRRAQGAGSAAPFFTLASAVVGPISNAAGDLQMLAGIMKSSCMCGVSSSSSAMQYSVSPFAGLSRLAVVLGNVGLTAAMALIQWTIVKIAHHHSSRSSLNKKAFAKGPTTTLRDTSIEAKGGKRSRTTSATPLPHSLKTIRQLEAALQFPNVSLRVAFLLLPGVLASSCDILFTYSSTTTTPAEVVAAVFGFLYTAVVLVAVEVLVFQCRVLAVPLRFVAINFAELLPAPLGSLSRRKKISDTLLPRGTWEPKSHACRFGCIVSGLRGGCEQLWRFSPLLNITVQMLSAVPANGSVGCGVIQLLTALFTATLGFTYALKQPTRVWFASIINAFSLCLTASLTISGMLCREGIVSEDAVLRIGLAVSIVGMLSSVYSVLVRASERWLIKRKEIKGTSGACVLSDVGLRVTHHQLESPHSRCSQHELVLTPEQISCDACYALEIQNASVQPSRAMASLRPVVSKIVLDTRVERLEELITQICSNGEKRNFNRRVSSGADKARQ

SEQ ID NO: 2895 - protein, 1307 aa, Bodo saltans
  misc_feature (91)..(191): Xaa can be any naturally occurring amino acid
MTGLVTLDLSNNSLHGTLPELWNMTSIQYLYLYSNTIGGTLPSSWGMMTGMRGLQLYYNKLSGSLPDAWSFMSNLNRLYLMVNSLNGTEGXXXXXXXXXXXXXXXXXXXXXXXXXXXXXXXXXXXXXXXXXXXXXXXXXXXXXXXXXXXXXXXXXXXXXXXXXXXXXXXXXXXXXXXXXXXXXXXXXXXXXRSTISSSSQNHRTDRRGRHVVQAICNTCVHWRLRCLPQQQCHQRPSGRGVPQVPREISRILSERLAKRAGVDYHQPAQQAGKKRIMETVDEDGRVVRTVGFAEEQQRLKDAAMEAERVKQKQEEERLAILAATTTSIMAASGGEGEEGAALVSDRPIISRLPPSKERNKVYFEVQTDGATRHDATGIVIIDLTENKVMMYDRSGRHHGNRPEPGYDIKEADAQACIAGGTIRVGLKPVVLVTALYEDVFRSGEFFLHAEHEQRKRDDVRKAKEAAVAAKVVIAPRMNFGSILGLGAPVFRKRPRDGESGFIVPVAGRSSRSGGVSGCLQELCALHEANREGAVVLFRADYKRDINGRQIVSVVVDPVIGDKLRPHQKIGVQFLYDCITGERMAGYHGAILADEMGLGKTIQTVATVFTCLKQGKHGVPVAQKVVIVAPSSLVANWCNEFEKWLGPGAVKCFAIAESTPKGDRILSRFEKKKGAYGWLPRRDLSREMGLGKTIQTVATVFTCLKQGKHGVPVAQKVVIVAPSSLVANWCNEFEKWLGPGAVKCFAIAESTPKGDRILSRFEGEGDVLVISYDQLRKYVDRLSKMRGVDLIVCDEGHRLKNAEIKTTKAVDTLPTRRRIILSGTPIQNDLSEFHAMVGFVNPGILGNQDLFSRVFEEPIMSGRDPHCPDHTKELGADRAHYLANLTAKFILRRTQTINEKYLPAKVDITVFVRLGEVQREIYSRVIDLVEKLSSTPLVLITALKKLCNHVDLFRDALKDDTKEGGAPRIPKSIMPKNCPPGQLNNSVGSKMEFVSLMLDELKSNGDRDKLVIVSNYTQTLEIIAALCTSKHVAYFQLDGSTPIKRRQELVDRFNVPTAQEIVFLLSSKAGGVGLNLIGANRLILFDADWNPANDAQAMGRVWRDGQKKKVFIYRMLCAGTIEEKIYQRQVSKQGLSANVVDMKDDSKQHFSTEELKQLFAYRPDSLSDTHDLLQCDCQAASSSSKAQPQQQVELKFRKVGVPVTAKAATGGPRMDELRSWMHISDVAKFALDKVISKMATRDKRLISFAFANERDAKKYAATEEVAVDRAFVKDEGNITCCSQTRDGDGADEDEIEIVQDTSSDSDEE

SEQ ID NO: 2896 - protein, 1202 aa, Bodo saltans
MKTLRLEDNALNGTLPSSWSTMSRLKRLHLNDNSLSGTLPPEWSAFTLMKSLHLSSNDLSGTLPSAWQSMTFLIHLKLRSNSFTGTVPSVWSSMTILQNLSLRSNYLNGSLPASWSSMTKLAELSIRSNDLTGSLPTSWSAMIAMEDLHMRSNGFTGSLPAAWASMLKLQWLNLRSNNLTGPLPSSWAVMTTLETLDLQNNNFIGSLPSSWGAMTNLQELHLNNNQLNSTLPVAWGQMESMEDLDLSANQLTGLLPSSWGNMTKLVALLLDENCLEGFVPGSYSSLALANVSLCQTRVHRRMINCSDDHQWPSYCESFISSSPSFAASESMSISASSLASESQSRSNTISDPASRSTSAKTSATLLRHDAPSNSTTPTMDTTRTISSSILTPTVSRSTLLSLGSLTPSQSAMLSGSSSHLSSTAATTKSATSITPKLSAALMQGEATDSLSRTISFTVSVPTSSSSFSFSSPSSYTPSTSSFRRRSLSSLVSNSAHPPQTLSLVDRANLSRSFSLSTRMCGGVFSYTTFVGLTNVVLTSNATTYFVEQPPVVVLQLPNDSQRVAVMAATANVVTLPVTRSVLSNRPALLVNISLESKLSGHQLQWLNITNVTRISASHQPCVFRISNQTFVASSEGFTFAVVVVIQPPENGWLAPGTSYFVDSSIMLVASLACDESVVLELAINIPCLAVPLASIASKVEAATKYSLIAAALTGGASSGSALGRVMATRSMVLCNADAAVGGGAVELHFEICGDDDPSSLVARSAILSNVLLLVAAAGTLFVCAAAWCFLCHTTFYEALLVVCLPSSVLPAWTVTLTSTSGAATLLWARIGASPCPIVDSLIGVVGVVFALCTTVVVILTWLDKVQLATDAPGFWRCIPVVHVARDADEQRNLSGWHPNLHLVTRVALHKRWRWTTTDHHSTEQPLKMSGGRRDDSLRAAAVLVSEFRVLWYAALDQGLLVLFACLSVVSGLNQVDDTLCRAATIITVALLLTQLIVLGIAHPFTTLFSFVHGLLTLTLTTVSVLAQFLYALLASSTTQDLWLIELTAGCNLAIVGVSAAKMLVDLIELGSAAKRRLLSASSLRSARRIIRQETHDEDVEVKTMLLRSHDDFSLEEESMGLMPLAEGQSNDNTLSVNFDSNVPHYFEMADSSSDNSNINFAPTDSLESSHVVRTEAEYSRLGADLSMAVDTYFLLAGPSDEN

SEQ ID NO: 2897 - protein, 737 aa, Bodo saltans
MSALSTTVTVAIIVCLMASPTNADPDPVIERANLVRIYESCGGPKWQYNPPLTTASNDRWDPYNSSSNYCKWYGIYCNYHIDTNPLYGVSKILLAGVGMSGTLPGAAIANFTLMGALDFSNNSLTGTLPLELSTLSASLQVLSVFNTYISGTLPPEYGALVHLQYFNAWRMRITGTLPREYSTLVNLLTFDVTYNTINGTLPPEYSTWTSIQQFNTYETFISGTLPSSYGAWTSIVSFDVSRDSLLATAYPFSPVSDPNSISGTIPPEYEFWAATVITFHTYGNVIRGSLPPELGAWKVVQRFLHYNNLLTGALPPEYGSWGSSVHAFYVHNNFITGTLPPQYSQWSKVAGILVYNNSITGTIPETWGYFKLLTSLQLHLNKLFGSIPDSFGNLGSILSMNFALNNLSGTIPASAIANLRGVQSIGFQNNPFLGGSTLASWTHIFATGTFPLVSTCGTQICGPEIPALVIPPFTYGYGCLPPKDRSLMSLDAVATTALITLLGDVTWNLSLPCAAPHPRGSTVTVSKKLHPHEEPQQQAAPLAVHGVPLATSSFIISALAVQQLASIGSAAGAGVHTMQAALTIRRLRQMCDDGVNAENSVGGSGSGGDEATCCDAGMNPTQWNIDVSSGGGTDNSDSITPPFVGTLVGNTILLVGLGVLRLCGCRLFDYLSKIYAFESCGPRLRQMLDTICVAFFSCSDVAVFWSTFSFLVSPTISASAGLMSAAVSPATVVMGVF

SEQ ID NO: 2898 - protein, 1156 aa, Bodo saltans
  misc_feature (971)..(1070): Xaa can be any naturally occurring amino acid
MEFYHSTNGPFWGDFFSKVQGWNTSLSCSQPWTGVFCNGSDVLTIALSNLNVSGTFPAMLANLTALLELDISHNHITGTLPTLTSLMFVQLTKLSATDNFITGTLPPEWKALKNLELLNLGSNSITGTLPLEWSQMQSLQSLTLSSNKLTGTLPAVWSQLSTLQVVWLDPNMLSGTLPPEWASINLELLNLGSNSITGTLPPEWSQMQSLQSLTVSSNELTGTLPANWSQLSTLQQVSLQVNKLTGTPPPEWGSLNLTVVVLSSNNLSGTLPVAWKALVNLNIMQISNNQLSGTLPREYSSLSRISTLDLSKNSFEGTLHSSWSNMSLVQSLVVSSNQLSGSLPPAWAAFTQLGRLDLSNNQFSGTLPEKWAEMGGAIPQYSSIPQLSLILSSNTLQGTLPVSWSNLSKISLLSISSNKLIGTLPASWLQLTTLRTLELNNNRLSGRIPLDSNTSSSLTLLNVSSNCFTGTLNRTVRTTLTIDVCNTHVSDGSVFSACASRLPQRWPPGCNSETASLQPVLLLSTDTATLSNVSRSASHGISPSWDLKASISATVMFLHDSSSLLPSLAVAASSPIAATAVISAVSGVDSGSAQALLTILDSACSCTSPTRSLPRQRQGVQYQEVEQRSSVPRAASLALSPLVLLGDSVGPFEVVVGNVALSVGALLVHCSVAVAHHLLCTDDDESQMAELNDDASAQPKPSTYDLSVLSVHRLACSPSGALFRFPSATLRFTAFLVAGIVWGVTQLLSSPGFFTGNGAEEGNISDDLFEDAQGFDTITVLLGTCISIVFLMGLGAALYVVVLQSWILDGAQGLQFEPFGDVRGNTNPFSPPFPPRAASVLCSRGGQWGPIPRRTAFGSPIATPFMPWCLQWAWAIGPSTSLIAVALSTAHPPLRHRTRACDGIQAVLIFLYIVTAVVFGKLLPHRSMMRSLLAAFSNALNGAVVVLSLFFFWHRVGCCSAPFIAWLLHWXXXXXXXXXXXXXXXXXXXXXXXXXXXXXXXXXXXXXXXXXXXXXXXXXXXXXXXXXXXXXXXXXXXXXXXXXXXXXXXXXXXXXXXXXXXXXXXXXXXXVCWWVHVVVRECFDVCGRLEQRVLQGQRGEQAASSANSRRQSQHPHSRIDIRAYPAELHDDVLRLQQLAALQRLIELAANVTDLGQ

SEQ ID NO: 2899 - protein, 1345 aa, Bodo saltans
NSFDNSTHHSTTRMTKILSGSTLVKALLMALMLIVGTTTSQSCPCHSAPYRAALLELYNATEGATSWSTKWNTSSPVICNWYGISCGLSGNSTSAVNIQLTRNGLTGTIPATLSTIPVEQFTADDNALSGSLFDTFSVWGASLTRFSVNNNSLEGTLPTSFGNWTSMVEFQVSGNSLTGAVPSEYRLWGNVITFNVAYNRLSGTIPVEYEQWTRLETIDLSANIGVTGALPVHSSSNGGQNAAHPIWPKLKSFRILGCQFHGTLPVAYSAWSSMTSFEVSQNALTGALPTEYSQWGGSVLHVSCTENRLSGTIPQAYDHWINLLSIDVTANSLGGALPRRNPATTPTAILWPKLTRFTLSLNAFTGTLPDEYSQWNALHHFQVHSNSFIIGSLPASYGQWGPSLLTFICFNNSLTGVIPAAAYASWTSLQTFDVARNGIDGVLPDAVLLWPRLLRFSVERNKISGTLPESYAASWSQVNTFLVSFNQLSGTLPASYGDAWKASMVTFVCYMNALSGTLPGSYGLWSASVFQVADNRLTGTLPPDFSNWGSSLLVFSCTNNSLSGAVPQSYATMWTSIVVLELGGNALSGSLPVTAIASSSTWGRLNYFRIDRNRFSGVLPAAYGEQWQTSLFTFEIYQNAFTGTLPPSYGNWSAVDTVRIDSNQLSGTLPPQYCQWGRLKSLNLYNNSLSGVIPTSCAAGWALVTELELSSNQLSGQLPDSPGAWPLLRFLRLQDNQFSGTLPPSLTSSTAVVAFSDDNNKLSGTLPAQYSNWGTSLVTFTCTNNSLSGTLPNSYSAWSSLSMFRVEVNRFTGALPHEYGEGWKGMMSFGCYNNSISGSLPGQFMQYWNNLQTIDVSNNLLSGTLPPLSSQQQTTRPVVNAFRIFNNRISGTLPPSYAAWGPSLDAFRFDNNVITGSIPTEYASWSAITYFRGVNNSLSGSLPQQLSNWTSLRYFRVDQNALTGTLPTEFHRWTQIATCIVSRNQLTGTLPAVFGSSWAIISALHLHANSFVGSIPAEWGQMTSLKELFLHVNNLSGELPLSFSKLVRLIFFTIAANPMLNGTLPEIWGTAWSNRGSIVFTALWLQNTSVVGTIPTSWQGSMFSPFGSMLSLCGTHLCGPASTSLLSGIPFVACVPSFLMHEDVNLDTISQFLPSVPLQSLSSALVDTCASLTTAPVPTNETRTPNSFAPSATPPVLNMPRAVLSHTEIAVTAPIGAALASAVGAAPAAFGIFRSSKLVSLLKCGDPMPVPEEVDSSIAPVAIGHLGPFGGSCLLVLGLVVGQTARKQDSHTPMVQQFLATAAKLRLPGRFGVVIFSLCPPMWELGLALLIARGNSVGLGGICAV

SEQ ID NO: 2900 - protein, 904 aa, Bodo saltans
  misc_feature (782)..(881): Xaa can be any naturally occurring amino acid
MTTFVAYANTFSGSLPADWSVWSQLEVFQVWGNKLSGTVPLQYFSQPFCRTLQHLDISYNTLNGTFPLQAALSNCWQSLQQLLLADNAFSGDVFSGVTFNTKTSPKTALLDLNLGDNEFSGTIPNDRTLALLMPHLQTFHLYNNLFHGPLPIAPVAWWTNLLEFQAESNHFSGNITRLDDEVARVLEETSPVSSPSSWSCSIQLFSIQFNIEITGQLPASLALCVNMSNFQAVNTPLAGSLPSTYGDGWANSISYFIVRAANVTGTVPDSFAKWTKLTYFDIGQNNLTGVVDFVDSWRSLETLRLSNNQFIGTLPAALALNVNLTNLYLQYNQFEGTINPNFGAGCPLIVQFCVQGNLLQGSLPAQLSQWRSIRRFLAYNNSFSGTLPSEWSAWGSSITQINIAQNQLEGTLPPQWGAWISLNTITAVENHFTGNLPPSWSQWSLAGTLSLDRNSLTGTLPSAWASLSSIGLLSLSENFLEGSLPPELGLLPLLRLLMLQGNANLSGSISSLKMLPSGSTAMFYVSYCRTKLFGTSPRVGLCYPCVPEGDDITKYSDNPLGVLEYCVFTPQTQAPTPVPQNETSAPAPSPPQATASRNSAGVSIVGSVAAATIGGDPGSAQMLASLLLSKCMCTSSSGALSSANDDDVFSIVVSSLTLSPFTALGPAAMAFGNGALIVLIFVGHVSIVVVVTRRNSSEVDKSSQMTNGSEPKRNRWKSTKNSVGAYIVQRWVALCTSPQAIALRFPNLSVGGAMFLVPGLVRGFVVVFGDMNSTPLETIGAXXXXXXXXXXXXXXXXXXXXXXXXXXXXXXXXXXXXXXXXXXXXXXXXXXXXXXXXXXXXXXXXXXXXXXXXXXXXXXXXXXXXXXXXXXXXXXXXXXXXLREEMDPERFAFPCNIKRSRSGS

SEQ ID NO: 2901 - protein, 123 aa, Bodo saltans
MLLLLSLLSFFVATSFSSSGGAHGSAPTNVEVDTLNEFDAVHYQYTTRATVDDLCNAWRTQVICNANNSNIVKLNFTARSLVGTLPASLSRLPMLAELILAANSISGTLPPECSAWGSGATIL

SEQ ID NO: 2902 - protein, 364 aa, Bodo saltans
MLTSRGFSIYSPTGSVQLPPGAVAGYSMSLSSSTVTFASPSTAGITYLSVSNSVVPDISGMLNITSIYISSGTLGTISWTSMLRLTSITIASSPSITGALPETWTNSHFPALTSIYLSSLGVTSIPSAAWSSITMLTSITIESCSSLTSALPSEWSSLNQLYSISISGTPFLGPLPDSWSYLASVVTISISGAQFSGTTFPASWVASGSMPNLVSLVIVSCGLGGALPSQWEGTAPLTYLGLSSNSIIGPLPTTVTGWSRLTTLDLSSNFIGTVLPDWSLSSLTTFSCNSCGISGPLPQWGYMPNINTIFLSSNPIGSSIPYSWSQSLQHLGALNLASSSITGQLPVTWTSTFLSTLSLGSTCP

SEQ ID NO: 2903 - protein, 217 aa, Bodo saltans
MTSMVDLQLHSNPMLSGSLPPQLSSMKVAVLVWIFATNVSGTLPSSWSAMSRIQLLTLSSNNIGGTLPPSWANMTSLQQLQISCNHLVGSMPASWVNNPSLLQLNVQSNCLTGTIPTITNPLLMLPNAINVCCTKVRGGGPDVSSCPGYQWPEYCNEYYSQSMSSSSSRNDVLLSATISSSASPRKSERAEGRCCSRRLGGWRKTHHEQHPTRHSDD

SEQ ID NO: 2904 - protein, 1415 aa, Bodo saltans
MEMSSCHTARRWKYDAWVVSVIVLMLALVWNAAAQSTCLCNSQSNRDTLALFYAATNGAQSWTNKWNVTNTSLCTWYGVSCESSMSYNVAISLVNNGLSGSLPDTLGNISNISFFSVAFNAISGTLPPSLSAWGKNLRVFSVASNLNLTGTIPLGYRNWSSLLNFNLTSNRFSGTLSAEFSEWGQTFRSFSVTSNSLSGTLPLAYANWTSLTQFACAQNSLDGSFPSARDYEQWTKLLNLDIGDNQFVGSLPLGTSAGGLIWPALQGFRVVANSFTGTLPEVYSRWTNLTYFSIAANQISGSIPASYANWTQLVTMYLYQNSLSGSLAPGFGAWVKLQYFQVYSNSITGSLPPEWSRWTSILTFIVSSNAMTGTLPPQYQSWTTIRDFRVDNNSISGFLPAGFGLWGSSITIFFTNDNRLAGPLPLEYGRWISLVSFNVKNNALTGTLPQEYQAWINVTYFNAATNLLSGMIPASYANWTQLVTMYLYQNSLSGSLAPGFGAWVKLQYFEVNHNFITGTLPSVYSQWARIIWFYVNNNAITGTLPPEYQSWSAIEFFCVQNNFISGDMPPGYAVWGSSITKLNASENRLVGTLPLQYGQWTALSNFVVSSNAMTGTLPPEYQAWTSIQNFRVNNNSIFGVLPPSYGLWGSNIAVFYANNNRFAGTLPREYSQWSSVVRVYISNNAMTGTLPPEYRAWKKIQWFQLHNNSLTGTLPSAYSEFGSALYSFYAVRNALTGSLPAQYSNWTNVNTFGTSLNQLSGTLPPSYGSSWKYVVFLETFSNFHTGAIPTEWGALSTVASLMLHANNLSGQLPNSFSNLRLLTALSVAANPNIVGTLPPSWGTAWSSRGALRLQLLWLQNTSISGTIPSTWSGTMFVTPLPYFSICNTNLCPPTTLAPALFLMCIPGDLLRTQLLNDEGASAFGGAAQFSALTDALKSTCPIPSSSTLAPHQRDNTTAAPPETTTQPPSVNNHTGAESLLRDNLFVVNGAKAATFSAPIGTALATTFGSAAAGLGLYRSAGLMRVLSCGGGISSNADDGAAEDIFPLALGHLIAFISSVLVAVIVVLTFYRRHTSLTAALTVLQMPGRFGFVAFALGPPLLEFGLALFLSRGGNIGLGIVALIAGIALLSFVVVVISKVPRYATFKQSTVPIPDDHHQQGCWRQVAAAYERTRLGRWHPLFSKGDGSLFLSINGTLFEDFTGGCHWYAMLQCVVVLIISIVSAVADSDILDGSAASACAAVEVVAGLCNLVTLAALLILRPYSSFSTLMQDIISELLGFVGGILVILVGAGLDNDDGLLADVVAVVLQIQFWLAIAATAALVLKACYLRLCLTARQPPRTIERQQHAPYSQLPKFHRSNLRQSASQEVVLHSDIREHHRRHDTNIQAEQLRSLISSICSQRRASHFWLPPDSPLR

SEQ ID NO: 2905 - protein, 925 aa, Bodo saltans
MIAQTDIEAGGLRHAYFEDKSDMIQLLLCLALVFAVCICFIASCGALSAVERSALVDLYFATNGAHWTLGWDVNNPNSDPCSSWSGVYCSSNSVYSISLYQNNLSGTLPDAIGNLTSMKSLTLPFNRISGTLPKAWSSLVNLQYLRLDNNLLTGTLPEEYALWQESILTFSARNNRFNGTLPVAYSSWRSLLYFLLEATDIRGTLPRAYMTWTSLVMFCVSNSQLTGSIPEEWAAMRQLRSLELYLNRLSGPIPSWIGNLKNVFVVNFASNNFSGVVPFEAWSKLRNVSGIVFQDNPLLSGVVPLSWNAIVAPFGTSVGPQNSVVSIVDICRTSICGPYLPALGFGYVCVPTASLSMFGLNGANGSMSASFEQFLAVWSTNVSVSCDRPPPLPTPPPTRTTNTATREYHPDGPNFVSRRTRTMAAAATSVSIGVAVQALIPGVAAVGGGSARGMQAALVVQQLRRLCTAARIETDFLELSNQGLSVSSNDKVDAYAEDVCCDSATSPTLLRVSIGKINSLLPGAAIGNFAIVAGFGIFRLFCHLLTELGQRSVSHKKTTAPPCVRHIIGSLAALFDSSHVALFWAPYCLLLTPTIGVAIPLLAALDSTPGTITLGVFVIFLWFVPWGVSIHRIVYRRGNVVWERTHHVYIKNKRTSLSTFEMLRRFLLQATEELLLSPPSNAAKLLRGFGPVFSGYRATRVWYFNVELTISVTTGILIGLSFTLRDVCAVNVIGWLLVAVGMIECLAACVFLPFSTPIDFLSLFVVCGFSVASQIISLVSDSDDGQAASQILGMLASFLQLGLTVFLSVEVVASSGGAKLFRSVSIREQEKQQQPTKAHKNNENCTETHGRRTLSDSCKDGRQRGTVPRKRTVAGLYVPHVFLNAAREPVWREPPENEVTRLKTRADSLLLLIDVICRSKQSVDR

SEQ ID NO: 2906 - protein, 1631 aa, Bodo saltans
TSLDVSMNAFNGGLPGEWSTLANIVQLAANACNLTGTLPLALSTLAPTLQALSLYGNKFVTSSTDNDLWGSLINLLLLDISSNNFTAPPQFGIVSSLKSLNVSRNNYSTTVPESWNVPSLIALNASENILIGGIPSSWVAAFGQTLVSLDMHGNQLNGSAIPLAGLISGDAFPVLQVVLLQNNIFSVTLSKVSLGLRLKTVDLSSNNLYGLLPQKLLVNSSNLLSLQLQNNYFNSTLPKAWGMLNLSLLQILNISGNRITGPLPYNWGNLFRYSTTDLCDNNICGPPPKTLANIANVGFNRCVQQLKATVCSSSISWAPTVSTGQSISQSPSPQNSATVRSVTVSSTEEHSKTRSSSISAESSRSKTVTPPPTVTPTNSPTPTTTNDGTSTQTITPAPAITPTTTASFNESVSKGTPSVSKIDTSSDTETPSESESRWITRSVKSSSISPLFSASRTASSLATATARTLSLSRDISLSNSKSKLTYTNVRTASASVTTTKDATDSVVTASHEITSSKSQGTRSVSDSGRKTATAMSTSLTSSLSATVTPMIPITATGRLTITANSATNINTMTPSITLSRVELSFSSSIPTPSASFSNRRTVSALSSTLSRITRASISPGQSHSTTESLSAVVSVSKSHRSSTRSSTQAASLSQSLSIMETTTESVNPNATATAGNSHSASLSELTVTGPNRSATASSSPSNAVTPTKTPTASPLTQSIGATVSQASLTLSRSQSVMNSRSQASVSPSISVTTTHSKQLPLTMTLPTASLTITGSFPTVTFVPSASPSLSPTAVVSLSHKSTLAFRHFPAVGQFAKSRALTPSMVTQSQAVTASSSESVTTSVTETITPTPPPTMSRGRNTPTATVPETGSLSSTLSTSRTASPTQTSVVTVSQESLSQSKSPTDLHTVSGTKPSLSHSSVLTPTVTLPFTATARTPSQTKTGSFLTVTFAPSQSPSLSTTAVVSLSHNSASPSATSQQSVSLLTQSPSSSVHLTQSRALTPSMVTQSQTATANLSESVTTSVTQTVTNTTTITISEFVSPTRSLSLTNTPPPTASRPISSHTTTLIISVTPSSTESITGASQSKLFTSSTTMSPTLRTLSRTSTMIGTISGLTPTRTHELAVTASEELHITNTVPTLSSTVSSSAGTLTSEQTRSNSASFTQTITNSAPSRTRSKSLQPTESAATATRSITFTPSSSQEHTATQETRSFSAIISISLPKTLSLLTLSSTATMQPTVTRYRDTQTETLILTYTKSPSPPTKSRSRSQTQTLRITLSQSIPLPITATPSVSTSRSAPTPSTSDSASVVSNTSLFTESPSPLSSASSSASLSISQQLSVSNSISQWDCNALNDTEIFLGLGVLGTEGNATLENSTVRFLFVAPAVQSPANPTTVAGATISKVIATAARPLDRHQLMDAPTALVLNITVSSDFANLWSVGSVTLSGQQLQWNATKAVTATWHLIVLRPPDEGWVGPGGLPLFFLDRTLTIDITMTCGHMPFLVIMVTVVSPRIPREFAEKVAAATQSAQFASMFAGGVSSGAALARAMAVRSMIVCDADSAVSSGVLDPGFVLCSSAAADTTSSVARSAIVSNVAIFSFVACALLFVAVVWSVVQKVPLRRAFTTMALPTSLMT

SEQ ID NO: 2907 - protein, 146 aa, Bodo saltans
MTAFSTTYFSWFVRFALGVVAAAQFTTAEDSLGANFDAFSFLSSLYNSTNGPFWSDACSVGWPNHNLTPDPDPCKTPSWFGITCTKTSGGSANLTVTAISLSGCGLTGTLPQWGEAASNINTPSSTRILLDTLDISNNSVYLVDIV

SEQ ID NO: 2908 - protein, 235 aa, Bodo saltans
MLFSCEGNLITGSIPTEYANWTLMSHFSMEDNLLTGSLPPSLGLWGARLDYFNVGGNQLSGTLPPEYAPNWTMIGIFYAPNWNSSWERVTSIDVDDNLLTGPLPNSYALWNATITSISAANNKLIGAIPSTWASSMTSLSGLVLRNNSLVGTKLKLTILSLSFNDLSGSLPPPSAYPFLWILDVQNNSRLTGSFTLPIMTAVASVCGTLYVNRMGLEGLRVDIGVHKLAPLTHMA

SEQ ID NO: 2909 - protein, 1101 aa, Bodo saltans
MLLRGIFLAHVLASCALAQQPAVNRTAERAALVALYDAMGGPSWLVSTHWKSATVDHCEWFGVACYESAVTLIILSVNNLRGTLPSDVAVWGAFTRLQVLFLNSNAITGTLPAALSASSMEHLHLGNNSLRGGLPKSYSVWSQLVYFDVSINRISGTLPEEYANWTLMNRFVASNNSLSGTLPSVFRSWTTMMQFIVNDNTFSGTLPENYAAWSTNLTTFVVENNILTGSLPEAYGAWQQLVSFHAASNHFRGTLPASYASWTTVQIFRVEENQRIYGTLPSEYGAWTAIVLFYAYSLSLTGALPSSYKTMSSLQAFLVYDNQFSGTLPESYANWSSITTIQAHNTGISGTLPSIYGTCWMNMSIFILSNTSVSGTIPNEWGSMRSMTVLMLHVNRLTGTLPASLGSLPRLTTLTLGDNNFDGTVPFSAWSQLRNIQVLLLEDNPRLFGDIPVTFGRIFTPFIGLFSVCRSNVCGPALPELFLGYGCMPQFVLRNHTLTQENGISIIQPYATFSHTAVCPVPPIMHATTASLSQSPSSDDDEDDMPSLPSLSRSAQQASTAAPFFTLASGLAGGSMSNVADLQMLSGILHSSCMCGVASSSSPSVTTSNMKYTTSPFVGLGLGGVVVGNTGLVAIVALVQWLVVRVTLKSSKFIEKVTKSNSTERRRDDHHRTAPAVGTLSKAKSTTRTSKSAAAMLPRSLNTVRQVEAFFQFPNVSLRATFLLLPGVFASSCSILFTYSANTTMPAEVVAAVFGFLYTAVVLVAVEVLVFQCRVLAVPLRFVPVNFAELLPSVLGPMSRRSTISRVLLSRGTWEPKMHARRFGCVVGGLRGGCEQLWRCMPALNLVVQLLSAIPVTGSVGCGAVQLLTALLTVTLGVVYALKQPTRVWFASMIHALSLCLTASLTISGMLCREGIVSEDAVLGIGLAVSMVGMLSSVYTVLVSITERWLMKRYVKKKNASQGVMALTLSIPLVHNKPPGLPSTMSRISVSNAKQHAAAITTDMLKGDGPLPLHATVTVASPASFSPSWSSTTSNTSAPSLPLIAADVTAATLRRSTKTIVIFDTRVKRLEELIKQICSNQDKHKRLLTHGGRSAHYASKI

SEQ ID NO: 2910 - protein, 337 aa, Bodo saltans
MLVDALILVLSWCSVCFADQVVVLEDIFRSLNYQNETPVNAMNVCGTWRGIRVECDSGNFTDCSLDGTLPESLPNLTNIDFFSVQSNKIHGTIPSAYSSLGLSLRTFIIGKNRVNGTIPESLSNWTNILTFQVNDNNLTGTMPSAFRRWKQIVDFGVSNNAMIGTLPSELSEWSSIVNFDVSSNRLSGTLPDEYRNFTTVNRFFVDDNYLSGTIPVNYSMMRAMIRFSVSDNTLNGTLPEQFSVWNVTSFEAESNQLTGTLPNEYSQWASIEIFSTQNNSLSGTLPRDFSNWTIIEHFSVKNNLITGVLPSTYADWSRVKYFGASNNLITGTLSEIY

SEQ ID NO: 2911 - protein, 1008 aa, Bodo saltans
MGKDTLISSRSPVLVLSVKTVIFAVQVALHAVTLVSGAGMCGCEYRYDTLMEFYSATSGPLWAQSDGWGSLDPCSTAWYGVTCDTCATCGTQKDILAITLYSNFLSGTLPESIANLANLQQLDLRMNGDLINSLKGVLPQLWGRLTNLQTLDLSNNGLTGTLPSSWESMSSLQSQDLSSNSLSGTLPASWVNISSLATLSLYSNNLSGTLPDSWGSMPSLQVLYLNSNNLSGTLHESWGRMPNLQVLYLHSNNLSGTLPVSWGSIRFLRELYLHYNSLSGALPASWRSMPNLQVLYLHSNNLSGTLPVSWGSIRFLRELYLYSNSLSGTLPESWRNMSNLRVLYLHSNCLSGTLPGFWGSIQFLASWGNMSNLRDLYLHSNSLTGALPASWEGMSSLQTLDISYNHLSNPLPASLGNISSLVKVNLASNSLTGTLPVSWGSLHNVRYLDLSFNDLSGTIPDEWGRLGDIQPYRAQLNLSFNMLSGIIPVLFAQLNQVCINIYKTSIQSGLRFVNSWTCLIQISYTGSHSSVGSFSNTSRIYQTPSTSVTSSVTFNEVPLVIPKSDVALKAAAQVSSGVGAALAVVAAAPSSGFAVDRLAMLSGFGDCSDAVRMTLQDVMTDSVPSFLDAPLQLSFGDAFGASQRGTVLGNLLVFIIVGIVSLAAVVIHRCGVGWKQKVVSPHYSKTLLSHSAAALRLPGVVIVIVVLLLDSLVASSLILVAYGTSANDISLGVVGLLAVSVLFLAACYILDPRPLSFRAMAVAREQITSDELISTHGLRTRIAAWWDLMMAPSNLWEARNFHSLFVEHFGYLFEGCRGGRHWWILVEATTTIVVSALSSIVPETEAACVTRAWIALALMSVILVACVAAWPMNTRVETGTSIVLLCTQVIVVACAIGGVGIVVDIIGLSVSISSAAVALFPIAWWLVSLVRNCCGLNGGKHPRDFLRSYDFRLRSRSVIPPVSSLSSKTVVLRTNIPSTMSFRGNSELFTTPALRVIIELICESSLSK

SEQ ID NO: 2912 - protein, 127 aa, Bodo saltans
MQLLVAHWRAAESLHFHRWCGGGTTWSVTWDFSDPQMHRAGLPELRATVRTFSEELTNTGGRLPTSLGALTALERFDLSINAVTGQLPVEFSNCRRVVHVNLSCNRLSAFRVRLRLRRLWLAFTVGD

SEQ ID NO: 2913 - protein, 109 aa, Bodo saltans
MRDSLSDMPLCSLVLLLLIQATITSMCGCQHRYTLLMDLYHATNGAGWTNTAGWMLAPPNCANDWYGVSCASNDVVSVALVSNKLLVTILAAGVLASTPGQKKKFQDTE

SEQ ID NO: 2914 - protein, 557 aa, Bodo saltans
MNLSITTPGDVSNRWLVGNVTLPGVPALNWTTQSTNTVSWSVIVVSYPAGGWLVVDASTSIFDDRTLMFEVALTCDGTRVLTVNVSIPAPVAPRLYAEQIATVGRYSQIASTIAGVSSGSALGRVMATRSMVLCDADTAVGGGVIDFTFDVCGTTTGASSVVARSGIVGNIILVTGRRVNVAASGALDSAIPNELCTATAVLCIPSSLLPALAAVVPSSAACATLLLARLGSSECVALDVVLGVVGLALSSLPGVVFLLLWACHVSDWCDSRWITIAHSSKRASISGHPLAAMVKRMTTRRWEWNTIHGDVVGMVFAWPVLLEYRELRYGAIDSGVLLMVSIASVISGLDRSNAQCRGWGLVALLLLIAQVVVVLVVQPFTTLFSQVWAIITISLTCLGVLAQLVFVWSNSSWLIDAAAVCSLAVLGVSMLQLLLDGARTVTAMRRRTALLLQATFREDSRSSVEEVVDRDDLHKMFVTNDVPLFLQLEDSITELDAVIVSDKCSDDKDEHRLISGDDLFWDNNGAAMGTGLVEGHSDIIFTDQVTDEDSELLSLDG

SEQ ID NO: 2915 - protein, 323 aa, Bodo saltans
MQAVLLLSVTVSGIVGTMCGCVSSMPALMEFYNATNGLTWAQSNGWGSADCNVSWFGVTCTLNEFDGSSRITEVNLTSNNLGGSLTESLVNLTRLQSLLLGSNHISGTLPAKWRMFDFLYQLDVSSNNLYGSIPSNWASVELSLVDFSRNSFNGSLAESFSNNILSIDFSDNQITGSLPTSWASFADICYLSVRRNNLEGTLPESWKTMGTNGSGLVLILSYNHIGGSLPGNWSQLTMIKELRLDHNNLHGPLPESWSTMESHVFFSLVLDSNPIRTTLPSSWKPSPAGGTLTIFDFVAVLSLANCSLYGTLPVSWTFPSIDV

SEQ ID NO: 2916 - protein, 540 aa, Bodo saltans
MSTAQSAGMCGCQHRYSLLMDLYTATNGAGWFNNSGWSTTPSACVTGWYGVTCDGSDVTVVALHENSLAGTLPLSFWNLTNLTTLDFGINALSGIGPSANKFDTANSPLPPRQQLQRHTASVLGKPTMYLFVSYNSLTGTLPPQWSNMTQLRTLSLQGSRLSGTLPLEWGDMTQLRELYLYSNTFVGTLPPQWSRMAQLSELYLYQNKLNGTLPPEWSNMTELTSLQLYSNSLSGVLPSAWSKLTLLTDLQLSTNSLSGTLTPQWSNMSSLSGLTLHYNTLSGTLPTEWSGMTQISVLDLFAAGLVGTLPPEWSSMQKMSRLYLQQNLLNGTLPFQWSNMRLLSVLDVSYNPIHGTLPPEWSNMTQLTVVDVSSNSLSGTLPSEWSSMTQLTDLSMTTNSLSGSLPSQWASMTQLNTLYLYSNSLTGSLPYEWSSMTQLTNLDLSGNSLSGTLPPQWASMTQLTGLYLQKNGLSGTLPASLANLTMLTILSLGSNRFSGTLPAELSRLTLLTELYLWSNSLSIHHHHHSSTGLRGPVSFA

SEQ ID NO: 2917 - protein, 515 aa, Bodo saltans
  misc_feature (414)..(513): Xaa can be any naturally occurring amino acid
MTSTTDLLLYSNSLLGGSLPPEWSRMTIIYRLYIYGTNVVGTLPSSWSTLTSLQLLALSSNSIGGTLPPSWASMTSLTVLQISGNHFVGSVPASWVNIPSLQQLDLRSNCFSGTMPASYNQRLLLPNAVNVCYTQIRGSGPNVSSCPGYQWPEYCNGLVSHTMSERVSESATKSGLRTTATLSNTASHPLDSESVSLSVLSPSATTLTATRSDSSFTASGGTPTFVATLSGTSSGSLTGPSPSQWVCNVSTGTAVVRLAPPFAASVGDGESVAFLVSLEPSEVADSAGLVGTARLTTNSIPRDTLVSFGLRVAMNISIAAPGNAANHWVVGAVRLATSRDALNWTVQSSNTVPWSLVVLTTSAGGWLDASVSMLADEMLDFVITMLCDGAEILEVSISVPAPGVPRVYVEEIRXXXXXXXXXXXXXXXXXXXXXXXXXXXXXXXXXXXXXXXXXXXXXXXXXXXXXXXXXXXXXXXXXXXXXXXXXXXXXXXXXXXXXXXXXXXXXXXXXXXXWH

SEQ ID NO: 2918 - protein, 586 aa, Bodo saltans
VVILDFQNNSYLHSDVATLPLNLFVATVCGTGICSVTTWPSQTLVCLPSGMIANIVAEGGDVLALAGTLEQLAVKYSTGLPRCATTAPSTTPSSSPDTNSTANITSNDASVAMTTTSAAATIATITTLVSVVTGVDAMDAQMLVSILGSPCTCTATSLTASSSDGWSSVLLIALSPFSPLGASWAVIGNSLLCCALVATHMLCVYVVDARETAERRQDNNQRRQRQSDSTPTFLGRYLTGGGGGRWRRRALMRLHFPNLSVSLVLLSIPGVVRGVTSVMDSFTQETTGLGVVAVIIGTTFAVLSGLAIEFVVYSHICAELFDWQKTERRGAKQLHFQAYFHVEELFSPVSRVFSRAFLPQGVWEPSQATKAYGGIVASYNGNSHRWWCVSSVVNLVVQILSGIGGDHSSCDALQSLTMIVLASAATFFAVIKPHRALLASYLTCVSLLLSCVATLLAMLCRLGNVDRSTVDGFGVFVSVVTMIMKVYTIGYSFIEGMLLKRNNVSPQSVVANESLSSSFVLSSFGGLPPTEAGRRRGGRASDVRSVTTPSSQVAHDNASQKMYKTRTQDEALEMLIELIVSRVREL

SEQ ID NO: 2919 - protein, 780 aa, Bodo saltans
MQALHAILLLLTIVTTCVAGSMCGCESSLPVLMDFYSSTNGPLWTESSGWGSTNCSLSWFGVACSEGSIVEIRLPSNNLTGMLIEALGNLTQLTLLDLSYNQLTGSLPSTWASMSFVTVTLSYNRIGGSLPVSWSQLAAIKVLILDHNDLCGPLPDSWSSMKGITTLILDSNPINATLPESWSGMGMIDVLCMDNCSLYGTLPSSWRFDSIEQLFLNNNALSGTMPLDWKYMGGSDEFSYANISNNCLLGTVPWANLNSGDSLQVLDTCGTHLDLETGNCTRLPTAWPAYCSSHTLTNDLATKSRSMTDLTSKHYSTERSQDYSTSDSDATLSALSQTTLGTVKTVFTSTLTPTVSMSPALIPAMIGTVTTRSVLAAAASAPLAATALLSAFSGVDPGSAQALLTVLRSPCFISDTHDHQATGEHSTQDSVMPSASSIALSPLVLFGDEGTIGAFEVAIGNAGLAMAFFFVHAALTLLHNRHNYEKSSYEEPAWICSRRAIQHLACSKSAAVLRFPSLSINFALYLTPGVAWAVSTLMSSTTTSVVQIVAGSVVGIGWIACFGVLLNAVVLHCWILDSEFGLTFRDFLDVQPFSPPVPRSVAAVICSRRGQWGPSGRRSAFGSPIATSFFPEHMRWMWAVSPLMSLLAVSLNTARPPQAARTVACDAIQSILMVCFLAVAVLFGSLRPHRSILRSFLSCFSAAHNALVTLLGMLARYQRISQDAVLVVAAVGSYTSMLLGIVVVCIGFLEQRLLPRQVNDATEQLWSIPKVNIAHEGVEH

SEQ ID NO: 2920 - protein, 339 aa, Bodo saltans
MQAMVHGHKPPKLNPTIYLYNANFSGSIPDSWSGMSSMQTLQMFVNSLTGTLPAAFGNFAQLISLNVAFNNFTGDVPVLASSKLRAVQSIVLQDNPHLSGEISLSWNNIWTFGAVCNICRTKICGPRLSMMTFGYGCLPQSALSLLASPVTISTIAKLSAASTFVDNVSCPSSVTPRSLTTSRSDIYVVPHDSAIPIVPVVSASGCAVGERSCSNAGASCIFWCASRFAGGARCTAPASRMCCGTVDGTDNNTGADSCCDASTSPSQLVLESVDSSYPQFAGAVVGNTIIVVAYGCVRTLLRLGLRSASSSHFFCSHLMELVDTTNVATIWPVFTSSIR

SEQ ID NO: 2921 - protein, 581 aa, Bodo saltans
MGCIFTCTILLMAGTALSCSCAFRLPELQVFYDAMNGPQWQTKWDLSDPDAPCTFSGVICDGSDVTIINLAQQGLSGQLPAAIANLTKLIRFNVSLNSVTGTLPPDYAAWASISEFLVDSNSITGALPPEYSAWGRMSRFYCGRNNISGTLPVSYSNWSIIREFDVQYNRAKWHAANGVRQLDDHFILHAQQQSHFVHTSTAVQPVGCRYLFFSLQDCDIYGSLPPSYSKWTSVSTFTLKNSRISGTLPPEYGAWIGIRLFVISYSSLSGTIPSTYNHWPYVTTIDLSNNLITGTIPNNIWGSMASLNAIALWNNSLSGTIPPQLLQVPKLQYLSIGFNQLTGTIPPATSSLLFLIVQNNSELSGSLPASILLLSAFSLFRVPTAPRRCTAFLTKMMYELDEQKDISAVISYKAACPKSQPHEVLRSSTTVTREEVAPDTNWTRAFTLSSASLASSGVFTTMAVAQSFLVSGTSALSGGTHGTQAALMARRKRALCQLSATRTIADSSGFPDLNQFTTDNDPSLLCCDAITSPTQLESIASLSPLIGALLGNTALVVIFCLIKYSLPFAVRYWCSPSSSTS

SEQ ID NO: 2922 - protein, 1336 aa, Bodo saltans
MQFFRLLVELFSRFFYDTFKLLLFLRLLKMMIIPTSFTVLVLLCAWPCSSAGIPCNCNQFIDILMELYDGTNGPSWTSNTNWGSTSGGDMCSLPWFGVVCFQSTSIISISLPNNNLKGSLPLSWGALTALTLVNLSGNALVGALPTEWGNMTSLQTCDLSENQLEGALPNSWVNMTVLSMLFLNNNQFFQQSLPSVWGVATSALTTLVLSNSQLTGQLPLSWGNMTSLRYVDISSNSLIGSIPASWSALESLQTLCLQSNPNLGGQLPDSFALLTQLTTLYLQNNNFTGSLPPAWGSLTELSMLNLSSNMISGPLPLLWSGMTKLTVLLLNSNQLSGSLPAEWGGMVKLQHLDVSINHLSGTLPSPWWSLSMLTMLIVTQNSITGTLPKSWPLGLDLLASLCLNGNFLVGTVPTEWGDWMALGVLLLHNNCLRGMIPSTLTSISTIRICNTHLIPMNPACDYPRNWPFACNALSRSASETSTNSLSLSVGLCSASTTAKELPSTTFSRSSKSLTNFSFLRSSTLSSSGGTLTAISLHSLTHSSWFPSSSSSLSLASISTNSATAIQTSSPFQSPSMPMSTLTNTTARTTSNTSSWATATRVGSTTMDATNTLSRPTQTLVSASTTFVVEEWCNSSALHGITEIALTSVVQDVSASVSSTTLLLLLLPAMDSVSAHNISSHGNKDAPTTATFTSISIPRRTLRESPNFALNFSFLHFFDNGMATESQQESSSASRLAASGAALVAGDSALQLMWVLGASGLSSSTSSWACVVAGLPTGQRWVDETQTSVLRATTAVLRFTFSCNTTSTTATAGTSPLDLFIVTVLVPSPGVADDLAGQVTTATKYSQIVSILAGGASSGSALGRVLATRSMVLCSADAAVGGGVIDLNLHLCLETDGATGSIAARSAILSNLILLAAVSAVLLAFSFAWARFTCTQIVDGLIEFRLPSSLMIAWTATVPSTSAATTLLLARVASSSCTGLDVLLGLVGCAATIIPCALLLLVWNAFCREPTPKWLCLKRNESTTSTMNETYAQWVYRSVKRHGLRQDWEWVGAGTLPAWSVLLEYRVLWYVAVDSGVLVVSAVLAVASGFGSASQCQGLTIVVMLLLALQCSVLMLLKPLTTFFSHLQSAVTLVLTFLSVLAQLLFIAASSNNPNCVSAVWLVDASAGCNLAVVGVSVVRMVLDAWETWLALRRRFHRLLLLRAELLLVPFESPLHVHRLDQHTALSNTKRKDPDPQRKAAALAKQPPQSFTVDKEQRLEDNVAPHSLTRETTEDAELSATNLREEQAGIRREDPPVRNNNHNEMMFWDSSGAAKTLAAPSRMNGDDHEAVLLTFQL

SEQ ID NO: 2923 - protein, 659 aa, Bodo saltans
MSLVVNCLLLFAALTLHTSHGSSMCDCANQISALMNFYNSANPTAWTRSDGWVSSNCSVSWYGVSCAGGSLAAISLPYNNITGTLPDSWSSLINITTLDLGSNSLYWTLPSSWAALSQLTALYLYGNNFNGSLPPEWSSMSKLSTLWIFGTKIAGQLPTAWSIMASMVDLQMYSNSITGALPSEWSSMTNIAKIQLGGNSLYGTLPSAWAALRQLTTLSLYANHFYGTLPAEWSSMTNITTLHLGANSLYGTLPSSWAALRQLTALDLHDNNFNGSLPPEWSSMSKLSTLWIFGNRIAGQLPTGWDNMRSVVDLQMHSNSITGPLPPQWSSMTNITTLNLADNSLYGTLPSTWAALQQLTNLYLYDNNFNGSLPPEWSSLTGLVNVRLERNPILGGVLPPEWSSMMSVTTLRLEANSLYGTLPSSWAALRQLTALDLHDNNFNGSLPPEWSSMSKLSTLWIFGTKIAGQLPTAWSNMTSMADLQLYSNSLTGPLPPEWSSMTNITTLHLGGNSLYGMLPRSWNALRQLTTLYLYGNNFNGTRPPEWSSMSQIMNLYIFSTEVSGTLPAAWGNMTSVNYLRLHENMLVGSLPPSWSSMISLRELRLDSNTLNSSLPDSWSAFRNVTTLRLDFNSISGTLCSSWSTMTSLQLLTLASNSIG

SEQ ID NO: 2924 - protein, 101 aa, Bodo saltans
MPNAWLEGSTAWGNLTTLSLRKCGFSGTLPTLLASTNLTLLDLSRNQLSGTFPSSLATAQLTVLDVSSNQLSGTLPADLDAASPLLTVLSFGANNFVGELP

SEQ ID NO: 2925 - protein, 1289 aa, Bodo saltans
MLLFGLVLIANALAQDACECNSTSNRNVFLQAQNESGGASWASFARFDANESVCAWYGVTCSGPDVTAWVVGDDIGMTTLPDSLGNLPFLQTLVIRNQALVSGTLPSSWRGLKQITRLVIASCGNLTGELSNWVAHELTTLVDFRLIGLSLSGSLPAAYANLTNLTRLVFSSCNFSGSIPGGWFQLQRLEIFSVEHNFLTSTIPSWVGELSHLRKFAIGSNNISGTIPGGMNANGKLEFVDASRTLLSGTVPDWLIAAPMYYLDLSGCLFTGPLPSSENQSTMSVLLLNENGFSGTLPPSWGQMTMLSLFNISNQVLNELCGGVPSLWSEASALTNVSSSISDTVNQTCPMTVTTTKTFCPCDTAAFRSPMLSLYEDTCGSTCWAPYTRFVETRSLCSWYGVTCQPATGEGIDGFALSVSLNSVGMNGTLPERFADIGLGLESFAIYFEVNLAGTIPNSWSRLLGLRQFALAGNQLLSGSIPTWSWPHLQNLQLSSMPLFSGTIPSSLLAMSNLSYLYLIACNFSGTIPPFLGSLRNLQALQLASNPFTGTAFPPELSQLKKLRVFLISNCPLTGTIPRWFSSLTSLTNFNAYNTTISGTLPKFLPPALIVIQLAYSLVEGPLPPSWPITNPTLRRSWLYQEDSSKPHLCGGIPQSWLSWRNNSIVFSLNTTLVDMPCSPQNQSVTHSMTTSNSDCSNNITISVSGTFRNCSLDAVPCISMSSIIVTQVNTTVFVASSSIAYDTIVSQTTSNVQVPLNTAFPTSAGGESWPVVSVNLVSGRSGVAFFPDINVNRVTLSAPTNGWPISPTPYVTQVVRVGSISFQCATTTNTVKLELIVIPRSLPQIASAVSTTSTVAAWGSAISGSGSTASTTARVAAVQKLLLCLDDNAGSGGGLLGLAVGNDHLSSARGAIAGNLVIVVVSFVAMMSLAWVLSCFAWTKMLKILERMHGVSLLFPIFVATLPSSAGGIVRIILVQTGRDVAAWVLAFFGLVAWGGVLIALLWMSWSLHQFIQPISKAQTGIGFHSLRGALKRHTVWIDVNNTSKASGISKVAALHVILREYRVLWYPASEALLGAISGASTAATIDNDATFCRATSATLCAMYVVHLLITVWFSPFTTTFGLVYAALVGALSAMCVGFQIVFSMDDNALWAVRTSTGAAMAILGISYLRTLMDCGALLRGVNSLRNDLIREREERNTESSDVLSLHVMDQLHELNSQSFALPSRSSSPPSFIMPTVAHSSFSFQPDRSESSLRLSVVEAEFWDSSGNARIFQNKTPFADPTLLNQQS

SEQ ID NO: 2926 - protein, 890 aa, Bodo saltans
MMSCILTCTCVTILLMVTTAQSSCLCAFRLPELQVFYDAMSGPQWKSRWDFSDPDAPCVFAGVNCDIGSVDITAISLARDGLSGQLPAAVANLSKLSRFNVSFNSITGTLPPEYARWVFISQFLVDSNNITGTLPPEYSAWGMSMKRFYCGRNTISGTLPKNYSSWIAINEFDVQYNQLEGSLPPEFSAWRPSSFTLGYNLISSTLPVEYSEWGDAIHYFYLQECDIYGSLPPSYSSWVNLSAFALKNSRINGTLPPQYGALVGIGTFVISSSFLSGVIPSNYSAWRGVTTFDLSNNRLIGTIPSGMWGSMTSLNAVALWNNSLSGTIPPQLLQVPTLGYLSIGFNQFTGTISKVTSSLLFLIVQNNPNLAGSIPSSSALVRIVSICGTSIQCPTSNMQLYCFPREMIYEFALTDVASALIKMMPFQTTCTTPQPPPVSLLSTTRTPFRDAAQPTPFDTFIPAHTAPQTLVAIASIVDPISGVALVALGNSRCAPQSLRSSTSTSQLVLSPFYPLGPGASVLGNIGLVLVVVVLHALSLRLYVAFGQNWHQWRARMSLRGNRSPTCRHRGSRSPPPPPPETTLKRRAAASVLRFPNISIVIALHFARGTVFYGAQEFVGTDDHNNGGGDGSDSIAMRAGSATASVLFLIGLVVCFVYAEGSGLTEPLVFQKYQLAVLRRWKWMPLWALPVGQWGPAEARHRLGPLRGSVTRGRERFAMLTAGVGVASSLLIGAVPSSASGCVAQAIGQCVLLSAAAVVVAVMRPLRISLSSWLLCVTWAVQGCLNFSMAASRVWDSEEAVSASSIFTIVHVVLGLITTIHRCVIMYWERGVKPKTAFLTPNEVVHLNSTMVPITISPVRLPSQHRQRGRRFAPLTYQAMAASRMVRPSRS

SEQ ID NO: 2927 - protein, 288 aa, Bodo saltans
MTNMFNLQLYVNELIGTLPSSWSNMTQQVYPCSTRTTSAGTLPSSWSAFSRLQYLYLCVNQLEGTLPAEWASLTTMTQLLLYNNSLSGSLPSSWSMLYSLRTLSLFSNNIAGTLPSVWSNMSSLVELRLYDNALNGTLPSEWSRLFKLEAISISRTNVGGTLPDAWSAMTSMNDLQLFENHHNGSLPDAWSNMTNMTSLRLNTNSLGGTLPDEWGNMTNMVNLQLYDNELIGTLPSSWSNMTQLEYLFLHSNSIAGTLPSSWSNPLLDCHRPQPTLCGVAWCLDATAH

SEQ ID NO: 2928 - protein, 557 aa, Bodo saltans
MPLFSPSYALLVALLLAGLQGLAVAATPMCGCEHRYALLMDLYVATNGPQWINRNGWSLTPSDCNVDWYGVTCSSGDVVSIALAANNLVGTLPSSWWNMTRILSITLYSNGLSGTLPPEWSSMMQITTLLMYGNSLSGSLPSAWSLMARLNNLQLFSNNLNGSLPTHWSAMSSLQLLYLYSNKLSGSLPSSWSALTALTGLALSSNSLTGTLPESWSAISSLRIFYLYSNGLTGTLPSSWRNMTSMVALRCFLNSLSGTLPPEWSSMTQITTLALYINHLSGSLPSEWSPMTGLTNLQLYSNSLSGSLPSAWSSMSSVQLLYLYSNSLSGTLPSSWRNMTSMVDLTLSGNSLSGGLPQSWARMSNLCQLNVQDNCLSGVVPPSFVNLSQLISFGGLNLCHTKVRGGTNVSRCTGGDWPTECYRLVSQSHTLVTISPTDRRRSRSSTQSPSDPMGTTTVSSVSRSSTTSQSRSASHSLSKSTTSSIVQCALLPSEMVDVLLAPLTDVAELLLSSSLLAAVVSGSSYTWVNSNDTTLHMIGSPIERRVLTSLPYVGLNI

SEQ ID NO: 2929 - protein, 291 aa, Bodo saltans
MQHHRRRPHHKLLVGSMTTALLALLLMSSTTGDDMCGCLGRVPLLLDFFYSTNGPQWTSNTNWGPLDATNCSALSPWFGVTCSNNDITQVNLASNGLTGTLPATFSALTSLTYLDFHGNSVVGSPPSSWSQLSAIQYIYLQDCKLNGTLPDEWGVLSNLRVIQIHVNRLVGTLPSSWWSLGTNMFNLYLSSNSFQGTLPTTWGNLTGMHLSRHSDFLHPQLSQSVISSLLKNRLSISLHGRSKAIQILNAAVLVKHHLTRGYPLTLGQNLSLPSSSIFTVSLCKRQSMKES

SEQ ID NO: 2930 - protein, 956 aa, Bodo saltans
MSTDNDAHSCRILALVTALLLTPLIVAVHGSSMCGCEHAFPTLMEFYSATNGDGWLDHSGWGNMTNCSNWFGLTCSASEVESMILSNNNLTGTLPSSLSLLTHFLSVLLNGNHIRGTLPASYASWRSLITFNASTNSLTGSLPPEYGAGWPQMLNFQVHSNALSGTLPQSYANWVVVTIVTFSNNALSGTLPPEYGVHWNSIQNFQVYSNQLTGTLPPEYSLWGSALHYFYVSHNQLIGTLPLAYRLWTNLQDFVVNSNKFSGTLPPEYADWTNAVRVYVEGNKLVGILPPAYQSWALLSIFHAGSNYLVGPLPREYGAWTMLTDFEVQSNLHLDGTLPVEYALWNNLVYFYVNGNDFTGHLPPEFTNWTYLLHFVIDDNFLSGSLHASYGAAWGELTDFSVANNLFNGTLPAEYRQWMHLTNLKPMATVLLAHYHQSTANGDHRWSTFLSTSTASTAPCLQATRTGRRCTCSLQVRTLSAARCPLRTAHGVAFTTFRSNPTKSVAPSHLNTGHGEAAFIVSLSLTINSRDHYHPPTRIGRPSVSSTATAIQLNGTLPAEYRQWMHLTNFFVYSNDFEGTMPHEYSNWTKLQRFVAYGNNLSGTLPREWSTWRSLSIFQAYGNSLTGTLPPEYSEWGSSMVHFFVHANHINGTLPSSYSNWTSLYMFLAGANSISGTLPPAYSAWRGIYYFQVESNQISGTLPPEYGSWRGSVYSFFVADNQLTGSLPPSYKNWTTNSKFYCYSNQLNGTLPAEYSAITTMTTFYAHTNRFTGSLPPQYGAWTMLTQIDVSFNMLTGTLPDDYRLWAGIQDIVVKSNMLTGVVPVTWGVPSFANLRLLNVEDTCLKGWLPASVLSSVATLKICNTHIIERTNCVTAGGSWPAFCPNGTKTVSLSSSMTATEGSHSLKAGSETASRSAHTHLISRSAHTRTISRSAPTRTTSRNAYTPTAPMSVSLL

SEQ ID NO: 2931 - protein, 1009 aa, Bodo saltans
MARWRHDVLLLLSLLLLPCFFLSYRCACLANAVALQSDVDIVAQFFKATAFRNTTAVSTDNLCVRWPANVVCDSILTRVLELNFGNANLVGTMPTGLSGLIYLSSLTVSDNQLTGSIPSDLCRSGNMMNVHVGGNLLSGSLPPELSNCTLMRTFNVSYNNLSGTIPATYSAWGTSIVTFDVSVNDILTGTLPPELSNCTSMNTFNVSYNNLRGIFPTQYATWKTITFFDGSNNSFTGSLPPEYANWTQIMSFYVNNNFLSGTLPPQYGIGWKSISMMTIQTNSVTGSLPAEYSTLTTLSVFNVALNLLTGTLPPQFAAWSQISQLYLYDNAFTGPIPSSWSTGMTSLQLLAVFNNALSGSIPLIESPLFTTLAISFNDFSGSLPTSTSWPSLTTLDAQNNSKLIGPINLPVTTFMITSCDTQLCVDRPQLALQVCLPSGFVVGAINADKSTILTRLFAFSYSTPSCTAATTAPSIPTLPPPSNGPAATNQTATTLDNQRSASGAIASVAVLGAVVAAVDASDAQMLVSILGSPCVCSTTTSQEREGSVLLLALSPFSPLGSAWAAIGNSLLCCVVVGLHSVTATIVSSRCERRSATRCSLSKASQRNTTLLGRFLHDSVKCERRRLFARLRFPNLSVTVLMLLLPGVVRAVVSVAGMMPTSPQPSYSLDVAAFPISIVFAIFGGCFIEEVAFRHVDAEVSNPSPSSQLTTLRFSYHRHPLHSSKVVPAALSAIALPRGAWEPSLARASYGGVVSAYIGEWRRAWIVLPLANLIVQILNGIDGGDSTCDALQAITLIVLASVCAFIAYARPHRALLASYLVCASLVLTMVTALLGLLCRHGAVSPDAVSGFGVFASVAMFVFKLYHVLIRFVEHRMLKRSRVDLSLNRQSTSSHDDITGQRRKLMLIVERHLIARNGGLVASSSSSCAMQREVSAEAIDINKLSETRRRRNGTAAGTAEATILQLCDGKQSAQTKKLSVEQMEALRDLIQMAMERSSVSKSSGDGAHLLL

SEQ ID NO: 2932 - protein, 135 aa, Bodo saltans
MMLFLKVLVAAVNLVVMVDGFCPCASQAPILETLYHATNGSGWLNPWDLASVDAPCSWTGVTCTSGGAIIGLNLSLRQLSGTIPKVITNLTSLQTLYLGFNRLQGTLHTEYQLLTQLTVFYFRENLLTGTLPPEY

SEQ ID NO: 2933 - protein, 392 aa, Bodo saltans
MYVSLLCTYLTILLIAAPITTVNAGLMCGCEHRYGVLMELYTATNGPTTWVNRAGWGYTSTPCNMTADWYGVTCNGSGDVTSIALSSNGLSGTLPASLSNLTALLAFIASSNRIGGPLPSAWGTGLTQLRNVSLDGNLLTSTLPPSWGGMTLLQTMKLNDNQLSGTLPDGWSTMTSMVSLYLYSNSLTGTLPSNWSSWLHVQELLIYSNDITGTLPSTWSQMSSLQFLYLYSNSLSGTIPTTWWAMGRLMAIVLSGNQLTGSIPSSWGEGGVEVMPLLYYVDVSSNQLSGNVPASWANLSSLQTVHFSKNSLTGTLPAAWGASRGALTVLDIQFNQLTGPLPDAWGQMRSVQQLLLSGNQLTGTLPASYSSWTGVNNILITNNKLSGSLPAS

SEQ ID NO: 2934 - protein, 741 aa, Bodo saltans
MQETLRSLHSMAHHFFLLLRTLLVASITLNTSHATTPMCGCMGQSSALMDFYHNSNPSGWTNSDGWGSTDCSIPWYGVTCNGASITSVDLSSNNLTGTLPSSWSSMTSMSNLLLYNNPMLSGSLPPEWSSMSQLSLLYIFGTNLSGTLPSSWSSMSNIFDMLLHSNPMLGGSLPPEWSSMSELSRLYIVGTKLSGTLPSSWSTMTRMLDMRLYTNPMLSGSLPPEWSSMSQLSVLYIMGTNLSGTLPSSWSNMTSMSNLLLHTNPMLSGSPPPEWSSMSELSQLYIFGTNLSGTLPSSWSNMTSMLNLQLYANPMLCGSLPPEWSSMSQLSVLYIYAANLSGTLPSSWSNMTSMSDMQLHYNPMLSGSLPPEWSSMSELSRLCIFGTNLSGTLPSSWSSMTSMLDMRLYTNPMLCGSLPPEWSSMSELSLLYIFGTKLSGTLPSSWSSMTSMANLQLYTNPMLSGSLPPEWSSMSELSQLYIYGTNLSGTLPSSWSNMTSMLDMRLYANPMLSGTLPSPWSAMTSLQLLMLSSNGFRGTLPQSWAKMTQLTQLQISSNRLVGSVPAAWVSIPLLQQLDLQNNCLSGTMPATTSPLLLLPNAINVCYTKVRGGGPNVSSCPGYQWPQYCNGVVSHTRSDSTGASATESHLLLSTTTSTSLSDTSTGASATESHLLLSTTTSTSLSDTSSSVTMSSTVTQWVCNVTGGTVLVQLTSPVVSVDSSGPVAYVVSAYPNDTSRCIS

SEQ ID NO: 2935 - protein, 244 aa, Bodo saltans
MRCSWWSTSNFLFFPVALLLCLDALRLSNRIILASAGPMCGCASHFDVLMDFFNATGGPTWTIRSGWGASLASPCTTSSWYGVTCVDGNITSLDLSGNNLKGTLPPSLGNLSQLQFLNLYINRISGTLPASYGQRLVSIQQISMHSNQFAGSLPDSWGALPRLTYLNLDFNRLNGTLPGEPWSTSSLLTSLSLNYNSLSGTLPESWGHSMSTMTYLQLTSNVRHTPLCLGLELGFVDASGRSIV

SEQ ID NO: 2936 - protein, 499 aa, Bodo saltans
MAIWASLRSTSFPLRAIWLLLALTTTIVSASMCGCQHRYALLMDLYSATNGTWWLNSSGWNTTDDCSVDWYGVTCSANDVTSVVLTSNRLVGTLPLSWWNMTALTLLALCSNSLQGPLPGTWGNMTKMVSLQLYANSLSGALPPEWSSMTMLDTLFLYSNKLSGTLPSVWSAMVRLVNLQLYSNAFNGTLPASWSNMSQIVSLFLCANSLQGTLPASWSSMSQLSQLCLYSNSLNGTLPAAWSSMSQMTQLYLYANSFNGTLPASWSNMSQMLTLYLSINRLTGTLPASWSSMSRMTSLYLHINTLDGTLPASWSNMTVIQVLDLHSNGISGTLPSLWSSMSRLTTLYLGVNSLNGTLPESWSNMTVIQVLDLNSNGISGTLPSSWSSMSQMVTLYLYSNSLNGTLPPSWSSMSQMAHLYLYSNRLSGTLPESWANMTQVTALWLYTNSLSGTLPSSWSSMSLLRVLYLHGGNKLSGTLPTLWSTMVALTDLRLSSNML

SEQ ID NO: 2937 - protein, 1764 aa, Bodo saltans
MSRILALVVACLILHSLPPLAAGQCPCDTSTSVKNALLDLRTSIAATGWSLSQSTCTWSGVTCTANNGLTALDLCGDSSCSGNGMLPDNAATWNSIGQSLTSMTINNNLFKLSSSATFPLTASKGLTNLRSLRFYYFSPAGNFTFPVGSSSGYSMVLDSSTLSSLSVFGISAAQMTSVTISYSAIPDLSGCTSLQSATVVGGTVDDVLSTLGWTSMTSITSVVLSTLSFTLPSWTGANFPKLSTISLVSLRMTSLPSSWGSITSITSISIFSGSFSSTLPSSWSSLFNLNAVIMSNSVTMTGPLPSSWGSLPAITSISLVFVTFVGGSTLPSEWGQMPLLTSLVISQCGLSGTIPVWSSASSQLALLNLQGNSFTGPLPENPVGWSKLTTLTLSDNIFQSTLPLWAPLSSSLVTFICNLCYLTGPLPPWGSSRSPMSSLQVITLTGNNIASSIPSSWGLMPALTDLVAPTAQIVGQLPLTWVSPQLRTLGVSGGNNQLSGNISGLTIASNVFYTLDLGSHLIGPGCLFTLPAGLRTLLLNKNVCSGPHPMWASATSLTVINLQSNQFSGSLIGVSSLTALQVLRIDLGNIFSGSLPNWGALAALVEFSASSNAFSGSVPAFHPQANLQIFQVDNNLLVGSFPSISASTNLQTLNLALNAFTGAMPPLPSPRLLVLNLMVNQFQGPLPDLAAASSIQQVNVSFNNFNGTLSLSTSLSGLQLFDVACNSLTGTLPAWSACSTLMYVNLTCGNTFTGTVPPLHALTYASLKRLDFTDQKLTGTLPAILGTYFYTPSYWPSIGVQSMLLGGGNRITGSIVTFLAWRSLQRLNFSGNNLSGVVVMSGATLPSNLWSLDISHNNVLSGNVPAPSVGSMPQMRHFLLGGDAHTFSGVLPSLHSIFPGLVRLSLSGSFPVTIPYAWLVGSAAWVNLTTLSLRKCGFSGTFPSPLASTQLTLLDLSRNQLAGSLPADLSSYAPLLTFLSLGENLFDGQVPATWSSLSRLMHLAVNSCQLSGTLPITLATLGPTLQVLLLYGNNFASSPSTDDLFWASLVNLRRLDISSNNFTIIPYLPETLSKLTSLNISVNPLNTVLPVQYSTNISQLVVLNASRCGFMGTVPFAWSNFTKLLTLDLSDNLLSDDSTSGSSSSSLSLQHMLDNATSFPSLQSLNLRGNVFNSTLDPSSYIGPMLVNLDISFNGLVGGLFFNLLLNATSLQTLQLQHNVLNSTLPKGWAISQVVSTSTVLQLVNLSGNELYGPLPYNWRSVFSRRSLTLDLCGNQLCGPVPMVLRSGISSYGLDRCAGSGSLRTDVPCYTDSMTFTSSSSVTHEITGPTESATDPLSQTDTIIPSITPTMTNPQTMSLDSHSPTAASSSTLTTSRSPRTAVVSASVTQSDATITFNLSSSRSPPTKSRSTSRATRSLPVTMSPPKDTATITCSNQSTPSSTYTATIRLPRTPSASLAVTFTRPTGTPSTTQTRHSVTQEQSNSPTVTPSPTLTATPSFSASRQTYTHRVSDSSTKTPTMATATRFWTISHSSSYWDCTAVNDSEIWIGLGNVSAGLLDNSTRFVVATPVDAPAHPARISSSSREQSHAISKAIVTTAQPIDRHQLMDAPTALVLNITVDSPFASYWSVTNVTLAGQLLATSSIKAVTGRWHLITLHPPDINGWVGAGGLPLYFVDRVVVLEVVMACGSSPILSVSLTINTPGIPREFSDNVATAAQSAQILSVFASGVTAGAALARALILRSTVMCDAYAAASNGVIDFNFDI

SEQ ID NO: 2938 - protein, 95 aa, Bodo saltans
MELLYAGYNSLSGTLPAGYSAWTQLNTFSLKFNSLTSTLPVEYAQWTLLETFDLASNSLSGTLPPQYSAWTQVTSFSVSNNMISGPLPQQFAAWT

SEQ ID NO: 2939 - protein, 269 aa, Bodo saltans
  misc_feature (257)..(269): Xaa can be any naturally occurring amino acid
MCGCEHRYPILLELYNATNGPASWKNCVGWSSGSLSDCSSGWYGVSCDGTDVTEISLLRNNLNGTLPPSLGTLNSLTILTLTANSLRGSLPRTWATSLKILELNLNQLTGTLPSQWAEIVNISSIDVSSNQLTGTLPAEWRSMQQLATLFLYSNSIAGTLPEAWGGGMNNMQRLWLYGNSLSGTLPNLWSAMTLLEELPLGYNTIGGTLPPTWSTMTALRDLFLDSNDITGSLPTEWSSWVSLEYLRVWSNRITGSXXXXXXXXXXXXX

SEQ ID NO: 2940 - protein, 783 aa, Bodo saltans
MIVFDVAGCDMYGTIPSSYSAWRDVKEFYVSNNRLVGTIPVTLASWANLTHFIAFKNGLSGSLPKEFSQWRRLQRLIISNNAFSGSLSGEFGQWTAMFMLVLANNSFSGDFPTTFAAFTQITQFAASYNQFSGTIPTAWGDKWTALTSFFADHNQLEGGFPASFGSLMNLNTLMLSHNDLRGTLPTTVRWTGMIILTLQNNPKLHGNIPTSWNAAFSPLARVMTVCRTKLCGSAAQLSMTALGGFPCLPSDTYYDTTQTDDKNTILFAFIALVGPALKSPSAPCFTDSASPTKEVIVHDDSAPLPPGVASGASAAATAANMACVFTGGCSASGFAVVQGASAAARLAYRCAAAQYAEDNGEDAAKVALSAADSPTQLTLSPLGDTAGPAAGTMVGNTAIVVASGVLMHAVELARQRMVHGRGGEPSGSIGVRALESLLDLLGHDLLPGSSAGFFVMFLQPTLSACVTVLTAVDLGVGVRVALALPCIALWVGAIASVGYVVHARVSCAVAFVPAAARRGAGGGASRATRRHASACVEAVFRRAQAVRSFAWEPSGAWTWRRGDAGSRWYAHHFGAFFRMYSARRRTYVAVDCSFIALCGLVAGAAEATGSSASAACFAMQWGAGTLAALTTAVVCLFAYLRPVLTRIDTASYVALGVLAVASEVAAATGDETTSNGFAVGALGLQLALVVASMVLGATWRDSVLEPCADPTPPKSLKLVELVDGDKERTVKQLSDKKLMAAAGDADVTIPFLFSHNPNLSQSEQLKRLVVLASKVKRRASCAE

SEQ ID NO: 2941 - protein, 671 aa, Bodo saltans
MGSYWMQYLDLSANMFSGNPPNLVQAPNLISLNISHNRFYGSLILSTSLSSLSGFDVACNSLVGSLPSWSNSYSLKFVNVSCGNLFSGSVPPFSSLSYNYLTTLDLSDQALTGTLSSILGQVLSEGSSGIGMTALLVGGNYFSGIIPNFLTWPQLERFNVSGNNLSGTIATVGSLPSNLWSIDVSNNNVVAGSIPIPYCSSGAAPQLQHYLLGGDAHSFTGSLPTTLSTTFPNLARFSLSGSFLTTMPYLWLAGSAAWKSLTTLSLRKCEFSGTFPTPLASTQITWLDFSRNQLNGTLPADLPSYAPLLVTLNFGENGFTGQLPANWSNLAHLEHLDAHSCLLNGTIPAALSATLQTLILYNNSFVSTTSLSNVSADSNHPTESLNWWSSLMNLRQLDISANKLTTLPLVTNTNFSKLSILNMSDNRITSTLPTSWGTSLSNISALNVSRNYFFGGVPEAWGEKLALLRVFDASSNNLNSSQASLLLSLRWNVQVLRLQHNNFTGVLNSILVLSPALTDVDISYNQLTGYLPLQLLSSAGSLNYLQLQGNAFEGDLPRLWGQGNLSSLKLLNLSLNSLSGPIPVSWGTFLQRGNLSTDLCNNNICGPVPKQLRSFQTVVGGWFHRCGGAPKKRHRMLLLHKRSHQHSHFLQALQDTHGSVNDTLHSAQCLH

SEQ ID NO: 2942 - protein, 1065 aa, Bodo saltans
MSIRSSALLIPAIWSRCFHLLLALLLALTTIIVSASMCGCQHRYALLMNLYTATNGTGWLNSSGWNTTNDCNVNWYGVTCDGSDIRDISMISNRLQGTLPSSWWNMSGLRNFNLISNSLTGTLPESWGALTQMITFALSNNRLSGNIPESYSNWSSLFTFVVGDNNFHGTLLPSFSNMTRIVLLDLSQNNFVGTLPDSWSSLASLNGLLLSSNRLNGTLPSSWSSMTQLGGAAAEVGLQLQNNSLTGALPDTWSTMSILTILGLSSNKLSSPLPSSWSSMTQLITLDLSSNALSGSLPQSWSTMTRLVNLDLSSNIVSGTLPSSWSSMSQLTSLFLSTNSLNGTLPGSWSSMSRMKSLYLHNNALGGTLPVSWSNMSQITSLFLCTNSLHGTLPSSWSSMSELSQLCLYSNNLNGTLPAAWSRMSQMTQLYLYANSLNGTLPDSWSNMTVIQLLDLHSNDISGTLPSSWSNMSQITTLILCTNILSGTLPESWSSMSQMVTLYLYSNNLNGTLPSSWSSMSQMAQLYLYTNGLSGTLPSSWWSMSLLRTLWLHGGNKLSGTLPTLWAAMVALMDLRLSSNMLTGTLPSSWSTMRAMKILWLFSNSLTGTLPSSWSSMSQMISLYLYTNSLNGTLPASWSNMSTMQLLDLHSNNLGGTLPSSWSSFNSAVVKFFLSNNRLSGTLPSSWSTISIVAFDVSNNCLSGGIPSSYAFPALTTSGGGFNVCNTKVRGGGAGVALCVNINSWPLFCNWVVSHSETCTDDGAPTHSGPSKSRASTSYAGTLSLLLSPSKTFLSTATRHARSSKTWSFLLSWSSTTTLSTSDFLCGALLNNTVVSLPPIMSTDLLTSGTGVGIVTTTSATRTHREIDDNVPTVAIVGSPLSRSFLQLHAPVALNVSFASPSVAALSHWSIGNVTTGGAPLVFRAETSNVVPWSGVLVQPPADGWIEPTTSLLVATAFELTFTMVCNGSAMLLITVTVPSPGAIVLYAEQVEASGRYSQVASLLAGGASSGSALGRMMAIRSMVLCSADSAVSGGVLDFDLRICSVRSSGDSGAAAVVAARSAIV

SEQ ID NO: 2943 - protein, 452 aa, Bodo saltans
MNLFIVSDNALNGTLPHEYASWAKLTQFLVDGNSLTGTLPARYSSWGDSIAWFSVANNYFTGTLPLGYGAFSNLTSFAADGNQLNGSLPQSFSNMTSLMNFKCSNNSFSGTLPASFGAMVFMQSFDVDSNGFLGELPESFSRWGPSLKAFSASSNSLSGTLSPSYGNWSNVSVFNVHSNRLTGTLPPQYSTWTGMIRFTVQENELCGSLPPQYAGWGSLQTFNALDNSISGTLPNSYAQWSSVGLIGLSNNSLSGTVPHLWGTSMTLLHMLLLANNEFEGSFPSDSFVVLSALSISFNNFSGTVPVLPSLAFLDAQNNSRLTGTLDGYHTLAAASLCSTLVCSTSLMIIFACFPEGAITAQCANAVSVTQEFVELPLLALQHRHSVSTCPPPPPPATVSPAPHNYTTINNSIPSETVAPLSTQSTTTSFAVAAAVASAISGVDAADAQMLVS

SEQ ID NO: 2944 - protein, 179 aa, Bodo saltans
TELQTFLVFLNNISGTLPPQFSAWSAVTIVAVEKNMLTGTLPPEYKAWTMIGTMRCYLNQLNGSLPHEYSAWTGLKLFNVQSNQLSGSLPPNYKAWPAITNFYVDKNLLSGTLPMEYSAWRSILALSLSFNSLQGTIPASYGGMPSLQIFNIAHNMVSGSIPAAILQAPALLSFIVPFN

SEQ ID NO: 2945 - protein, 201 aa, Bodo saltans
MKLCLRNVSMFPFFFHVGEGFRRELQFRCAPSRTIVTRSPQTTRQSRFLFLVLMAALTVALLLSLNVILVSNACDCQSYRAPLLALYDSAGGPHWRNAWDLNLEVCDWFGVNCKLFGIYMINLTQQQLTGTLPGASFTDSIGGLERLILSSNNLTGTIPPQYGNITSLWKLEQRYVIHSASQFSYRHATTIVRQFYSAEAH

SEQ ID NO: 2946 - protein, 1027 aa, Bodo saltans
SVFGDESSTTTTRITGSLPVEYRQWREIVSFDTRLQRIDGTLPPQYSDWNRTIEVFLVGYNSLSGTLPESYASWSRMSNFVVGTNSLSGTLPASYGAGWGTSLLVVQFSQNSFHGSLPAEAYAHWTNITLFGASINNLTGTIPDAYGSAWNRTINEFYCADNQLNGTLPDSFWLWSRISVFAVGTNNLTGTLPESYGPGWGDSISYFEAPKNGLNGTIPRAYGTYWRNMSHIALTQNKLSGTLPATLARWTKLSFLYLRDNLLEGTLPIEFGAAWSTSISQVNLASNLFEGSLPQEYSAWTSLTSLDCGNNRLNGSLSSSFGPAWGPTITSFTATNNRFIGSIPSSFSAWTSIGRFAADGNALNGTIPVYIPTAWSQLTLLYLRSNRLSGTIHNNFDQLKQLNQLYLNCNDLDGTVPSTFRTMTALQYLTVSGNPKLSGPLPAAWGTSGASLSLRLLNLQNTSLFGTLPSSWSTSSSSLFSLGSFLTVCHTQLCGGAPPGGISVFVLQLCLQDDDSLCAMPDVAALASKAASFPVSSLPPCSSSTVAPPTTAPPSNRWQNATTIKFTSAQTAVAIIGGPVAAVAALAASTSAGLGTVRAGAAMRLVACGGATNDDTHDDEDVNELALLGGGYLAGYLGVCILLGVLVAWRVYTKKDVVSSGSSSSSSSSLWSATTTHLRLPGRAWGIVSGVVPSLVEYGLGLLVAAHSDPGLVVLGTVSLACSLLTCAWVWTIVTCRFDNVEWKRTDLRRRTTTTTTTPRRASSSATHISNQLLHSNKKKVLSVLVHRLHARMEEYTRQRSHGTWMDAHHHRGKKRNNEEESRSSPLSFVATHGAVFEDYCEGRVWFVVWESALAVAVSVLSAVAGAVTEACNALQIVGAVLQMAGLVMLVVARPHREARALCVGVAMEVLGFVGGVCLLVSAAAFPDDDSNSWSTAASDVLQAQFYVGAALVVIDGLYSRRIINALRSFFNAEQNKRQQPELSLPTHSWVHGGELRHRQLRDLIATICTQQRKQKRQGNIYQEQQY

SEQ ID NO: 2947 - protein, 282 aa, Bodo saltans
MLSGTLPPEWASINLELLNLGSNSITGTLPPEWSQMQSLQSLTLSSNQLTGTLPAVWSIMSTLQEVSLDFNMLSGTLPPEWELISLTVVTLLSNNFSGTLPTAWKALVNLNTMQISNNRLNGTLPRECSSLSRISTLDLSKNSFVGTLHSSWSNMSLVQSLVLSSNQLSGSLPPEWAALTQLGRLDLSNNQFNGTLPKQWEEMGGAIPPFSSIPQLSLILREPHRKATRLAHEQLLDLLKLICAQRRLRNGTCHRFCVCVTFLFFLLSTCHDDCFLLGLLCV

SEQ ID NO: 2948 - protein, 1189 aa, Bodo saltans
MISLAQLKIDQNVLSGAPIPTTWVSSMRQLQLFSANANRLNGTLPEIGSGGGEGSGLLALQQLSFFSNSITGTLPSSWGSRLTNLQILTLSDNKLYGTMPPEWSLLTNLTILQLHINSLSGSLPANWGPSLGGLTTFYAHQLSLSGTLPSSWCFMGALSELHFWQNRLSGSLPESWSLLQNLKHFAAYGNSLAGSLPASWGNWTNIIDIRLSNNALTGPPLPVSWYSMSSLQQLYLDGNQLDGTLPEMPRNSNSWQGVWWISFLSNHITGTLPSSWGQLSRLRTLGMAENFIGGTLPTEWSQMSSLTSLDVSNNNISGSLPESWAASLPYLSSVTLANNRLSSTLPDSWGNFPQLSSLTLSKNYFSGTLPVSWSSATLMSTLWLDSNVLTGTLPSNWSGMARLVDIRLGGNLLSGTVPSDWSTMQVLGMLRLNNNLLDGTLPSSWGRGSGLQRYLSEFTIFSNRISGSLPDSWSALGALQFFDAHDNRLTGSIPISWSALTMLYGLTLNDNRLSGTLSPLLSLPRMLLLNLRRNEFSGTFPASWVAVNNNSGGGAAGIMTSLALLDVSGNRLRGSLPTLSMTTSSSPSLVWKTSLFTVNVSGNCLEGFVPASWGVPTAGSFGVKTTLDVCNTRIHPSVVQTYPPVAGVRNLDFSSCSDEGQLSIVMRWPAYCQAMSGSASQSSQSSITASHDILSHTPTQIMVAAPTIISSTATSVLVQGSSVSAAVSSLLAMPASALSSRRLSVLASLGNCADDSRPSVNDAMNGDTDVAFLDSPLQLQLNTAEGNRGSVQRGTIVGDIAVAAMCVAVGGVLTVAVHFWTMSDSERRNASWRKRKREQRLRRMSRRSDHNQHNDEFDEETTCAEQTVAASARLRLPGLFFVLIALFLQPIVTSSMQLLAYGDASVDDVIGVCGVVVTVTLVATIARVVDPRRDKFRGVARDVDEEKLHHRRGRLRSKNRFTRCRATVEARWVALHEESNEWRARDEVHDHLFVERYGFLFESCREARHWWVLVEMSATIVLAVVGGVVPPTSVSCVGMAWFALCLCVVLLAACVVARPMSSVLESGVVVLLWGSQVAMAACAVSGNADEAAAVIGIVSSTLSGVLAVLMMMTAVRNAQWDKELMMSRVAPTLSSIGKAMISTANSAAAISTLLSERNKRKKDAALEMIVKLICDQMIAVRDRRSKENL

SEQ ID NO: 2949 - protein, 165 aa, Bodo saltans
MVLFSTLCSFFLRCVGDIGKSVMRVIRHLAILLTSLIVAVHGYSMCGCEHAFPTLMEFHNATNGDGWLDRSGWGNMTNCSNWFGLTCTTSEEAVQPPPPLLLPLSQRHRSCRVISTRQRLHSQFSRRSHQTARRCPSQPHLLAVASATRYTQLVRFHPSSQLFCA

SEQ ID NO: 2950 - protein, 173 aa, Bodo saltans
VISAKVPDVSGITSLQSIYLSLGTLGTLNWTSMVNLMYISLTNCSGVTGALPSAWNGTSFPSLMSITLRNVSVSGALPVSWGSISTLTVISISSCSSLSATLPTEWANLAFLQSLSIVNTAITGSLPSSWNTMLQVSSISIIGANLSATPLPNRLPPWLVVNIFPHIPRPFAE

SEQ ID NO: 2951 - protein, 434 aa, Bodo saltans
  misc_feature (315)..(415): Xaa can be any naturally occurring amino acid
MMPPNQRLYVVVSVIICVQSFLDSAASASDATTAPTDAVTLLTSFFQDTNGVKWSTSCSKDWLNSTVSVCSWPGITCSSATIMQNGPNANFTSRTVTSIKLTKCGLSGTLPQWLLATAAPSTPPPPAGMNVTVISVQLTKLDLSGNKIGGTLPSSYGGIVGSSIVTFTLSSNLLTGTLPPQYSSWGSTLATFAVGGNALSGTLPDEYSAWANIVTFDVNSNDISGTLPSTYSAWRQIQSFRAKNNDLTGTLPTSYSLWVGSIRTIDLSVNALAGTLPPQYQSFVNIGTFSVNLNSLTGSLPSAYSLWTAITTFDXXXXXXXXXXXXXXXXXXXXXXXXXXXXXXXXXXXXXXXXXXXXXXXXXXXXXXXXXXXXXXXXXXXXXXXXXXXXXXXXXXXXXXXXXXXXXXXXXXXXXFANRKSSLGVFTVDCNHNV

SEQ ID NO: 2952 - protein, 451 aa, Bodo saltans
MLASLLLSKCMCASSSGSTSDDDVFSVVLSSLTLSPFTALGPAAMAFGNSALIVLIFVGHVSVAVVVTRRNSSEADNSSQMTTGTEPKQNRWKSTKNSVGAYIVQRWVALCTSPQAIALRFPNLSVGGAMFLVPGLVRGFVVVFGDMNSTPLETIGAFLSTVVLLFYTSVILEWLIYRNLILLGLQEIDSNGFATSAPLHFEPYDSRHPFTPPVPKWLASVAFSRDGRWMPADKRNSFGKLVSPLKPSFAHWWLAIPLLNIFTTLLSSLPTTSTLGCDALQGIITTASAAMSVALVAVRPHRALIVSIVAAASLIVVAVTSALGLACRHGLVSLDELLSVCSALSYVALVGKVYVALLPNLESHILQLSANVASVVPSSPKTFRKRHIGKKATPVIARDASFASNLNSSGQKQRHHKTTRQQQCTVLKQLVEAICVKRRSYAIEDILLRKS

SEQ ID NO: 2953 - protein, 1073 aa, Bodo saltans
MSIRSSALLIPAIWSRCFHLLLALLLALTTIIVSASMCGCQHRYALLMNLYTATNGTGWLNSSGWNTTNDCNVNWYGVTCDGSDIRDISMISNRLQGTLPSSWWNMSGLRNFNLISNSLTGTLPESWGALTQMITFALSNNRLSGNIPESYSNWSSLFTFVVGDNNFHGTLLPSFSNMTRIVLLDLSQNNFVGTLPDSWSSLASLNGLLLSSNRLNGTLPSSWSSMTQLGGAAAEVGLQLQNNSLTGALPDTWSTMSILTILGLSSNKLSSPLPSSWSSMTQLITLDLSSNALSGSLPQSWSTMTRLVNLDLSSNIVSGTLPSSWSSMSQLTSLFLSTNSLNGTLPGSWSSMSRMKSLYLHNNALGGTLPVSWSNMSQITSLFLCTNSLHGTLPSSWSSMSELSQLCLYSNNLNGTLPAAWSRMSQMTQLYLYANSLNGTLPDSWSNMTVIQLLDLHSNDISGTLPSSWSNMSQITTLILCTNILSGTLPESWSSMSQMVTLYLYSNNLNGTLPSSWSSMSQMAQLYLYTNGLSGTLPSSWWSMSLLRTLWLHGGNKLSGTLPTLWAAMVALMDLRLSSNMLTGTLPSSWSTMRAMKILWLFSNSLTGTLPSSWSSMSQMISLYLYTNSLNGTLPASWSNMSTMQLLDLHSNNLGGTLPSSWSSFNSAVVKFFLSNNRLSGTLPSSWSTISIVAFDVSNNCLSGGIPSSYAFPALTTSGGGFNVCNTKVRGGGAGVALCVNINSWPLFCNWVVSHSETCTDDGAPTHSGPSKSRASTSYAGTLSLLLSPSKTFLSTATRHARSSKTWSFLLSWSSTTTLSTSDFLCGALLNNTVVSLPPIMSTDLLTSGTGVGIVTTTSATRTHREIDDNVPTVAIVGSPLSRSFLQLHAPVALNVSFASPSVAALSHWSIGNVTTGGAPLVFRAETSNVVPWSGVLVQPPADGWIEPTTSLLVATAFELTFTMVCNGSAMLLITVTVPSPGAIVLYAEQVEASGRYSQVASLLAGGASSGSALGRMMAIRSMVLCSADSAVSGGVLDFDLRICSVRSSGDSGAAAVVAARSAIVSNVVLLLI

SEQ ID NO: 2954 - protein, 1045 aa, Bodo saltans
  misc_feature (909)..(1008): Xaa can be any naturally occurring amino acid
MSQQTRICRRPFGVVTGTPLLHTVTCFVTIFFVVLSNHRLLMGRCDIPQSEADALAEFFSATKFGNQTPVTPQNACVAWPQLVICNASSTTIIELSCGAQSLTGTLPSTLSHLTSLTALYVSDNHLTGTIPPEYSVWGKHMKTFAVGRNTLTGTLPPSFGNWTSSLITFNVSMNNISGTIPLNYSAWGPTLRTFVLALNNFSGTLPPSLATTWTSMYYFHVGQNQFSGTLPPEYSAMSKLYHLDVSVNNFSGTLPASYGAMRELNGFSCINNSLTGSLPASYGNWTGMRSANFQSNGFTGSLPPEFASWTIIYYLSLADNRLSGPWPSQLSTWVELMTLFIQNNEFSGQLPGEISTTPRFNRFSARNNSFTGSLPPSYASWTSIVYFDASFSALSGSLPDTYAAWGPTIVQIYAMNNKLTGVIPSSWAPAMQLLQSLALQDNLLSGQLPSSPFPMLGLLLLSSNDFAGTIPTNLLTSNLKILDLQNNTLLSGTVPTRVPSVTTVCGTSLCPSTAATKCFPPNAILNYLQTLDNNILISLLFNYGYTLPSCTPAPPPTTFRNVTTPAPQKALRDGVLSGNVEPALSASVYATVLSGSALGRGAVPGLQRALSSLRLAALCNNNNKNNAGPSSSEGGNTSSSSDGSSMFGDLPDNPLGVSVPVGAETLSAAAGASVLNAVLVCGVGAVLHSLMILRRWFAQQQQSDSILDTVARGVVTVMPASLLPGALAVPFGTLMQPGVGACVALMVSSARTGASVACGAIMLCIWAALPIYSVMSILVRGRRGRRDRKFALMSSSISHHQPTLKARARRESVSSTLLQTVVRIATAFHAYTMHEMHRWGLRPSVEYDVDRNHRRRQKQSEPSNNAAYREYASYLLENMEAVFGGYVGGREWYFAVDWGVALVGGAVMXXXXXXXXXXXXXXXXXXXXXXXXXXXXXXXXXXXXXXXXXXXXXXXXXXXXXXXXXXXXXXXXXXXXXXXXXXXXXXXXXXXXXXXXXXXXXXXXXXXXRARLCLALCRWKRLLLCVRTACALSCGAGLCLGCLGC

SEQ ID NO: 2955 - protein, 1349 aa, Bodo saltans
MTIVALVVYCVVAASVMNHGATAACVCDTDTNINAALVSLRSSLNISGWTAASSCRWPGVSCSTNGALESLTLCSQRTPCGAGSSLPTESTTWQYLGASLTTLVIFDTQSEITGSFPLAASTSLTALTSITFNSYSPAGLMVLPTGAPTGYTMVLSSSGIAITLSEGANIIALVSRNSPIPDVSSIASLRSIRIEGGTLGTLNWNSMIGLTAIAISFISSALPSWTSADYPSLQSIKFQSMYAASTFPASWTSLTTLTSITIYGCEYLFAPLPSSWSSFANLKSIMLDGTPIVGPLPTSWGSSALTSIGIFYASLSGATFPSTWTQMASLTSLAIVSSSLGGTLPQWHTTTSLTFLSLSKNTIIGPPPTTVVGWGALITLALSNNPINSTIPLWQLANLAVFECSSCGIIGPLPSWGSSTTPMGNLSYINIDNNRIGSSIPATWGELNGISYLSAAWSNITGQMPLTWASPALQQLYVNGNAISGNISTLTFSSISFTAIDLGFNRIGPDCSFIISSSLNTLKLNDNFCSGAHPNWDLATSLNTVDLAGNAFTGSLANLPNLNVLRVDRGNRFTGSLFDGAVTTGLSEVRASNNQFSGTFPPGENFGNIEFLDISANNFVGSVPLLSNSFSLQELNISFNKFTGQLFLPPFSSMTLLDVSCNFLTGPVPSWSEFFSLAHINLTCGNAFSGTLPELNRPLCDTLLTLDATDQGLTGTLSSILGAVLEEGCSRVATVILLGGNFFSGTMPEFMKLPDLERFNVSGSNLTGQLSSSGGTFPSKLWSLDVSHNNALTGPVPVPSSSEPFMSLQHFLLGGDAHNFSGTLSTLNTIFPNLTRFSLSGLFPVVFPYAWLVGALAWVNLTTVILRKCGFSGTFPLMLASTNLKALDLSRNQLGGALPADLPSYVPLLVTLNIGENRFIGPLPANWSNLAALVKLDAHSCFLSGPIPAELPPALKTLILWNNSFSSLNLSSSRNLLHLDISNNNLTSMNFFASPSALTMLNISNNLFPPALLPANWSFLLPSIAALNVSQNAFIGGVPAAWATTMTSLNSLDASSNLLNSSALSLASLLSAFPSLERLWLQHNNFADTLGVGVAVGSALHDLNLANNALVGEIPKNLMTSNLTSLQLQNNFFRGSLPNFLNFGPSLTLLNLSSNRISGPLPFSWGNVFQQATVDLCNNSICGSAPTTLASISTIGGSRCPATFAVDAGCFTISEAFSISSSLCSACNSSSTAQSTSATQTLSAARSLSNASLSQQRSSTFSLCFSPTQHSGITPSGSSMSFEYSITSTSSVTKSTSRMQTPSKIYLTSSISSQVTRTGVALSLTSSHVELSSTTTSSLSRVVVVPPRQ

SEQ ID NO: 2956 - protein, 828 aa, Bodo saltans
MALLPRGLRCWSTATCRTVRWTPSYWLQCRACLVSCVSVVSGLTTSDAQCRGWSLVVVLVLVVQLVLLVALRPFTTVFSSVYNAVTLVLTILSALSQLVFVWAYSTDQGGLWLVDASSGLSLAVVGVSAVKLLLDVHQLAAAVRRRVVALRTLPSAASRELDSFGLVYLRLFGNGLTGTLPSSWSNMTHLTTMYLYSNSLSGTLPSSWSSLSSVQVMWLSINRLSGELPASWSNMKQIQILYLSVNALNGTLPSSWSNMTHLTTMYLYSNSLSGTLPSSWAAMTRLATVQLNSNTFNCSLPDSWSALANLQGLYIYSNNLNGTLPSSWSSMSQLAQLLYTNNLSGTLPESWSNMTVMQRLDLSNNSLTGSLPSSWSNMTQMVSLVLHTNTFNDTLPSSWSSMKQMQSLYLANNALIGTLPASWANMTQLANFNLARNSLTGTLPSSWSAWNGAQLIIGLGNNRLSGTLPSSWSKISQIVTFDVSNNCVSGGIPSSYAFPALTSSGGGFNVCNTKVRGTGRGVASCLGNSWPLYCNWIVSLSESGTTTDDSVTATSTSLSSTVTSTSRHRTASSSRMSMSRSSMSSGGTISLPRSPSCTFASTATNQTSNSLSWSSSSASLTASEFFCDAPPNTTVVSLPPIKSTAMLAGSGSAVPIKSTAMLAGSGSAVGVVTATTTTHTRVATLNALLKLAIAGSPLSRSLLQLLAPLAPNVSFASSPSVAALSHWSIGNVTTARGEAPLVFRTETSNVVPWSGVLVQPPADGWIDPKTPLVTATTFELTFTMVCNGSAMLLITVTVPVPGATVLYAEQVEASGRYSQVASLLAGGG

SEQ ID NO: 2957 - protein, 244 aa, Bodo saltans
MNQASVLMDFYNNSNPEGWTHSDGWGFTNCSIPWYGVTCDGASITSIDLSSNITGTLPASWSSLVNISELYLQDNPMLSGTLPSEWSSMINLQILFLYGNLKMGGSLPPEWSSMSKITSLHIYQTNVSGVLPSSWSNMTSMEDLRLCNNPVLSGTLPLEWSTMSKLFSLYIYNTNVSGTLPSTWSNLSSMMQLLLNNNPMLSGTLPPEWSSMSQVLALRIFGTNISGTLPSSWAKMTNVEELRL

SEQ ID NO: 2958 - protein, 346 aa, Bodo saltans
MNLTILDLSFNQLVGTIPSEWFPSDPSTTRGWLHLREFSLNSNNFYGSIPEPISKCPMEKFTLDTNAFSGTIHESFAQWDLLALNLHVNSVSGTLSSLFASWTNIIVFSVWNNSFTGTLPPEYSSMVLIVRFYVAFNQLNGTLPPSYGDWNNLTLTRFESNRFSGTLPAEWSRMSSVTQLSLFSNQLTGVLPIQWTALAETVTSINLDFNLLTGPIPPQWSALTLAFISLTGNRLRGTLPSDFSAPLMVVAVLNNCLTVSSLSSWWNARKSVGLVVPQRDAADCGSSTAAPPLTTAPNGEQSQLSNGSATNAALLRSSAVAMAVAPLLALSGAMPTGGAQRLLLQF

SEQ ID NO: 2959 - protein, 1150 aa, Bodo saltans
MQIFFFGVVILFTLTTPLCSCAVTTLNETDRTALKSLLDEWKLRLTDINMDGTQVECPVYNSSATVSVACDARGRIVQLSLPNRGISGTIPVSVSKLGTTLRYLTLSSNRLIGAIPQSFRALGQIRSLVLNNNSLSGSLDETTIALWQSLTTLMLSDNRFSGSLPTFTNNKNLRNIELQNNNMSGSFALQFCSNSSCLSLTKISLNNNNLSGTIPDFFADRCPNLTMIDFSSNHFQGTIPGKLITALPALQYLILSFNRLQGTFPQLVVEEGLPLVSHMVDLRINWNELSGLLDLTRYFELGWSATLRRLDADNVMGEFILKLPETINGGCALVYLRLDNTAIQGGLPRSLANCKAFNSISARNCSLQGTLPPEYGLAWGSSLITFRVTNNSLLTGPIPEEYLQHWSNIESFFLQNNALSGPVNLTQLFTSCLALKELDWSWNEFTGLIPPSTPLPPKIQYLHLSHAKFAGTIPSVWSDASDLIEISLVSNHVFGTLPAAFTKLRSLDMLAVADNSISGTIPVSWARGGLQSITILVLQGNAKLTGPVPPLMLISSPLKRLLTICDTGLCGSALTASVPALFCLDLNQSWSYLQNNPLQYISKDVPCGGGPPPIPGTNPTHTVTAEGFVVDDEPSSLSIADVTQVAQGITAPLSIVASLMSGADALDVQILAGILQSDCMRPAAMDNTKRTDDGGGGDGKSNLLATFTSPFAGAGSAAAVLGNISIGVVVFVVHLALVWVQEYRTRRAAPFRRHRRRRASSAPSSVSTKSLLNVIASPLALFGTTIAATVRFPNLTITLLYFFSGGIARAAVQGAAPATSLHGGGRAAGLDAVGIVVLLVACIWLAGLVLGCEVILYRQHIRGTGGGGSEPLQYLTFERRVFTPLSRWVLPRGEWTIPVDKLQSVGSLVNPFVDCRARIWIVIPLVNWVLQGLSSIPQYSEATCDALQALSILLLVGLALLMAVVQPHRVALVSCMTSMISLLTAGIVLAGLLYRRGNGSQASQSAVDAMTLITTFVILISKLLLVAVLALEKVLRRGRDAPMSRREEAPLELAVLMDGHPDSTPVHLLSDSVLSTLLAINNDSRVAMMSSPGGSTSLTSSFRASNTASFRMNESFARMNDSIPSVESSPLQQLIELIVSGGSATATSAT

SEQ ID NO: 2960 - protein, 614 aa, Bodo saltans
MEHVTVKCVSTISVLFIVFAFTETAVNSASCGCAFRYDALMTFFNQTGGNTWKDATNWGSTTKCPNSWYGINCTNGDVTKVLLSSNKLKGTLWEGFSLFGNLTTLSLDSNKLTGSLPFSWSAMTALQTLDLSGNSVDGSLPDEWSTLESLTDVTLSRNALTGNLPALWGNMTNMYSIDIRSNSIDGSLPPEWSDMLSLSTLYLSDNSIDGSLPVGWSMMASLETLDVSSNSINGTLPPEWSNMSSLNSLDVSGNSINGSLPALWSQLDSISTIDLSMNHLTGPLPSSWSRLATISSINLDHNLIEGSLPPSWNATTTLKTLSINNNLIDGVLPPSWFGMKRLVELQLSGNLLTGSVPSAWSAMPKLARLYLNDNQLAGTLSPLWGSMKNLVRVHLRNNLLSGSLPSNWTLMPLLVRLRLDGNRFTGEVPRSWCAAPFKILNLSSTCLTGNDCATINTSLTWDFCKTHIFVGNMSQSQRCSQDDNRWPTYCDATPTLTCCTPPTHSHTITDFGSDTSSQSTTATFPSLSSSDMVTTTRTSTFSKNLSSTITRTRRTDFLSVTRSVTKLRASTTINLTASKLTPTRTTSLTLSIELPLPVSYAAAAAAITAATSLS

SEQ ID NO: 2961 - protein, 1489 aa, Bodo saltans
MVNQRETMSTDPWSMRRQATLMSSKVALVLLLVLLQYGGSASAQTDSSCLCDSAVNRAALRAFYAATFGPTSWKRKWIGIENATATLCLWGAGLTCDASGMLSIQLDDNGLSGTLPVELADVQRLRAVSLASNSLSSGLPPQFSAWGSTIRSFAVPNNKLSGSLPSSYSNWSSIEVFSVFSNSLSGELPSPIWPMIRSVNLAGNVFTGTIPSEYALWTALTSIRLSKNLLSGTLPASLSGWGSTLTMFLCDGNQFSGTVPSSVINAWINLETADMSNNQFRGTLPTSENSGGFLWPMLTYFKVSTNAFEGTLPSVYASWVNLTYFDVGHNRLTGVLPEEYSRWSLLQQFGATNNTFSGVIPSSYQNWTLLQTFDVAFNSLAGTLPSLDSEIGGGRGSNRPRVLWPSLTSFRVFSNQLTGTLHEEYSAWTALTYFRVSGNVGLHGTLPAGYSAWGSSLTAFACDGCQISGSIPNSYVNWTNLETIDIADNQLTGSLPEVKPAGSATWPKLEYFRAFSNKLSGTLPAGYGASTTLNYFRVENNTITGTIPWQYSRWGSSLQLFMCQSNSLSGTLPSQLSAWSLVNYFRVQDNHLTGTLPESYSLWGSSILLFSVANNSLTGTISPGYANNWTNLITFDASFNRLEGLLPSPTTADAMSSFWPNLEAFRMQSNRFTGTLSPLYAQWAVLQVFYVHDNFLTGTLSPAFGLAWTSLTLFRASNNSISGTLPTEFSRWTMLQYFRADLNSLTGTIPESYASFSRLSTFILSRNQLTGTLPKSFGASWPLIAILHLYANRLTGSIPSEWGLMTKMAAMFLHTNNLTGELPSSLSQMPLLVYLSVSWNPLLSGTIPASWGAAFSGRTSGLILGAVWLQNTSISGTIPATWQSSMFTPMASTLTVCHTHLCGPAPPLLSLGLPFGMGVCMPDSLSREEPSANAVSKFASVVSLEALDTTFAGTCPSNATTHSPPPPPPSTPFEPTNTSVSPQPQRPSMTASSRPPATVVTAPIGAAVAASFGAAPSALGMYRSNGMMRLLNCNRGVPTTTRSTTRNGTTSQLDNNSTDEGEGQEDVDEVYRLAMGHILAFAGCVVIVAFAVTWAVLNNKSVVPSSAQSAATAFDASRSITSVWILLKVAMVQLHLPGRFSVVVFSLGPPLSEHGLTLLLLGVNRLWEQQLGTSGAVVALGAASFVVGAATLLAACYTVTFGFQCEFVPIGGNCMDDNEAHISNVCVKGWRRIKNRYETPRRGFWRPQNNGNSNNNTFLDTHGDLFATFTGRRQWYVVVQCVLAVTIGIIAALSESGVVEGPAQCGAAQIAGGVCMLLCLVALLVLRPYQSATHMALDTITELFGFISGVMMLLVAAVTSDDEDGGSDLIDAASSILEVQLWFTVSVIAIEALHELYSRWLNREGRHDDSNPSLSRAASGHGKNGQQRSNNFAINLQLPHQGHENSFQTDADVRRIENHLRQLVEDACRQQRRRLRAARYAAKSLKIAA

SEQ ID NO: 2962 - protein, 814 aa, Bodo saltans
  misc_feature (388)..(488): Xaa can be any naturally occurring amino acid
MKNMAQLAVGENLFHGQLPSAWEGMTSLRLLMASNCSLQGSLPASWSSMPRMAQMFLDINFISGGLPPSWSTMPNLVTLTLSSNALLGTVPKEWGSMRLNFLLLQGNRGLTGTLPSSWNSIFSNFAFVPIAFFSICGTSLCSPASSRFPGLWQSQFTCMPPGVAPSVGAASQESVIAEFLPHARFQSSYCFTPTHTLEAPDVPLPTPAAPTSNGKLAMNGGVSSASGTAAGVLLWAGLLTTAIPRAALMGGVSVGGVQGVQVTQRARLRCLMLENDAMSSTNDPLPDLGQSVWDNPLQFPIMSLRALYVYAGGALIGNTAILLIVSVALHFWAMRLRPRLVKEASQPPPSPSLSLRQRASAWIVLHTEGELLPGAAAAPYAILVQPSXXXXXXXXXXXXXXXXXXXXXXXXXXXXXXXXXXXXXXXXXXXXXXXXXXXXXXXXXXXXXXXXXXXXXXXXXXXXXXXXXXXXXXXXXXXXXXXXXXXXXAALSHGQHQWWTWQLIFFFYAADDERGDASGTIIFGVCGIVAWSAPVMWWTWQLMGPLRPFPFRCDPVELQQPPTTRSRAKQITFLSRFRHFVEPQMRWRHALVQRNDARAVVVGQTCRSLFTPYGARRHWFYTVEMSVVMALGMIAGVVASVPNSAACVAADACTWSMVVVCLGLVVAHVLLHPCASRLDHVLSVSNSILVLIALVCAAVEATDASVAFSVLASVEGIVVLFAITGVMGCLGWRRGTQPILPYYNESSSATASTAKMQSTLPLMVGGSRPSRGDSHAPRNSETPAFNAKQLNSLSSNPRKALAQLVKLACRQKFE

SEQ ID NO: 2963 - protein, 924 aa, Bodo saltans
MLTTLLFLMIAVLFVKPCACRIIMPLKTSTIVRSLASPCGVGAGVDGSLIVSACEACGIYKVMPNGPTTVIAGVIGACGFVDGIGSGARFYYPVGVATDAERNVAYIADQANNAIRALDLSTYAVKTVAGSSAGYRDGAFTLALFNYCNQGVFRTTTSGKVLYITDGGNGRVRKANFSSMVVSTVAVVPAPMLLDMSKDGLRLFVSSDYAVIYQIFLTNNSVILLAGGLGVAGFADAVGPAARFYKPRGVSLSHDDSALFVGDWYNYRIRRIELSNQSVTTVTGTGVPASIDGPLLSASIIGASQIMWHCQNTLKECGLVVVEHSTTYWSAANVRWVPMTQGTQSMSYTGATQDESNTLTGSVSGSAQRLSATTSATHEASVTHSLTFGTWTRDASVTLSPRPSSSVALSSSSTASSTKGSASPTATMRPTLSATLRQSESMTLTSMSMTPSSSSTTEVTATKSPPTRSKSSTLFDCNTAGLQATAVALAPVNETVSEIEMQLPYFRNSSAKCALGVSTGNASYPARDNQNQGLRGDPPFVFITSQDVDRLTLLQAPLLIFNFTLASPYQLVYYYVGNVTTPQGTHVSATWSVHPRSGVWHGVVVEAPSIGWVGDGVFPVLLYTELNLLVPLMCGDGHAMLTVVLTIPSPGVPRVLAAEVRRATQTALIVALLATGALSGSALGRILATDSMVLCDADAAGGGGVIDFDLTICNESPHLVESRSAIVSNAGVVAAVGVLLLLLAAVWSYWRNDTVAGTVTAVFLLPSSTTFLAARVASSPCVAVDALLIVLGLLLTVVPVAMLSYLAFNIANRWKCATKKNKDEAHDGERRNHTLKALRTFVHNATQRLWKWRAVIPSDTESMRPAWIVLLEYRVLSYAAIDALFLVAVSSLAVVGGLDVTNEALCRGCSAAVVVLLGAQVGVL

SEQ ID NO: 2964 - protein, 89 aa, Bodo saltans
MQWGSSITFFYAGENSLVGTIPSEWGSLWTKLRAFYASNNSLEGTLPSTWSPTLERLRLFGNKLQGSLPLRWAQLTRLAVLFLHDNQIS

SEQ ID NO: 2965 - protein, 183 aa, Bodo saltans
QTIPSEWVSNLTNFAAGSNLFHGTLPETHGGWQSIVEVLIPFNSISGTLPSSWGKLSSLQRLSLSSNNLTGILPSNWLTLTSLVNLYVQLNALTGLLPSSWGPAMLHLTVFYAYGTIPSSLAGMVSLVVLASSNSFTGTLPDTWGDWSLLITIKLYDNMLTGAPVPAAWVQSESAITCVRQSI

SEQ ID NO: 2966 - protein, 602 aa, Bodo saltans
MTICSSALLLPAVWSRCFNLLLALLLATTATIVSASMCGCQYRYALLMDLYTATNGAGWLNSSGWNTTDDCSVDWYGVACDGSDVIYVQMDSNSLQGTLPSSWSGLSAMQAINLINNNLAGTLPDSWGGLTLMNTLALNSNSLSGTIPESFTNWKFLLTLVVRGNNFDGTLLASFANFTRMLNIDLSQNNFVGTLPDSWSIMTNLNALALFSNRLNGTLPSSWSSMTLLGGIAEVGLQLQNNSLTGALPDTWSTMSMLTILGLSSNKLSGLLPSSWSSMTQLTTLDLNSNELNGSLPQSWSTMTKLQVLYLHNGNNFTGTLPASWGVMGALVDLRLSGNGITGELPSSWSSMRALQTLWLNSNSLSGTLPSNWSTMTRLATLQLNSNTFNCSLPDSWSALANLQGLYIHAGNSLIGSLPAAWASMRALVELRLSDNRLTGELPSSWSSMSNLRQLWLYSNSLTGSLPSSWSNMTQMVSLFLHTNTFNDTLPSSWSSMKQMQSLYLANNALIGTLPESWANMTQLAIFNLARNSLTGTLPASWSAWNGAQLIIGLGNNRLSGTLPSSWSKISQIVTFDVSNNCVSGGIPSSYAFPALTSSGGG

SEQ ID NO: 2967 - protein, 357 aa, Bodo saltans
MVQQSLLSSSPTTFAVGQQMCGCEASMDALMDLYRATNGPQWRHSEGWSADERKINCSIPWWGVSCANGSGVTQLELGANNLSGTLPDSLGSLTSLRSFFLSDNIISGTLPETLASLTNLRNLQANMNALTGPLPSSWGSLTVLLTLLLNGNHLTGTLPSKWSTMISLQTLALHNTNITGALPSEWSSMTGLFLLRLNSNSISGTLPDSWNNLSRLTAIRAEMNRIHGTLPAAWGGGMPKLQILFLSDNCLEGEIPLNYSAIPFSIGSFNLCNTNVSTTNSSSVPGSVLAQCSTTSTSNWATYCEEDANVVTATFTTVSASPEVCDPSFVALYLLGVSLMLLSPHSHLFNSVDYFRH

SEQ ID NO: 2968 - protein, 837 aa, Bodo saltans
MLLSCQKYSHCLAVFVLLTTCGVMSDVELSIEEANILAEFFVATQYHNSTAVTPANACTSWLNLVTCTNKSDGRDGSTISSLYFNRQSLTGTIPRSISNLTQLHTFVVSDNILYGTLPPELSNWNASLKMFDVSSNRITGTLPALYSSWTMLTLFNVSYNLITGTLPRSYSSWSGLHSFLASFNDQLDGPIPNEWAREWRQIASFQVASNSLTGTIPDFFSNSTTLLTFDVSLNFLTGAFPSEFHRNSPLQLMSVHHNSLSGTLPAKIAPMLTALSYFSVATNYFTGTLPLEYAQWGRTIVNFDVGGNQLTGTLPPEYSNWTSLNDFRTTSNQFYGTLPAAYAAWGLSLLRFNVRNNTLTGPIPSVYALWSRVESFDVGINSLSGSLPSNFSQWGSTIDRISVFSNRLHDSIPESWGSSMITLTRLLAGQNNFSSSLKAGSFPNIVVLSVSFNNISGVLPGLHSWPQLRFLDAQNNSLLTGSIMALSFVVSSICSTELCATTNIPNFARYACFPKDVSADDIGSDPSEVLSFATRYPFSPFLCSSTTTMAPSATPGQPSTLSPNSTAEVRAGAVVGPLESTSVAVGIVTSTVALVSTLGAVDAADAQMLVSILGSPCVCITRSPTQKREGSVLLIALSPFSSLGSAWAAIGNSLLCGVLVGLHIFCLRLMSSTRSDASLRSSNGPRNIMNRTLLGRWIAERGSVHCGDRRTLLARLRFPNLSVTFLLLLVPGIVHSVVDVSNQLASSLVDDPTGDDNQTSVSQELHASALAVGVVCITAAVFFAEIVAYRHVEYEVSSLSSAPSKRGRRHFLRFAFHENPTRVFAPFPRSLSTVVFP

SEQ ID NO: 2969 - protein, 284 aa, Bodo saltans
MLRLARFCVFGTNVAGTLPSSWSGMKSLQQLKLTSNSIGGTLPPSWANMTSLTQLHCDDVVSHTMSESISESASRSDFSATAPSTEYHSTASESRSRIRILSSFSRPSPSPSQWVCNVSGGTVLVQLVPPVAMVGDGEPTAFVVSLESSDVVDRERLVPSVRIATNSIPRATLTTRGLWIAMNVSISTPGNVANRWVVGGVTMLGEALNWTVQSSNTVPWSLIVLRTPVGGWLDASVSLLADETLDFVVTMLCDGAEILEVSVVVPAPGVPRVYAEEIATVGRC

SEQ ID NO: 2970 - protein, 412 aa, Bodo saltans
MFASIIIQLVALLIPFVAASSSTEMAALVALYQDTDGPHWNCTYDYVAIQGALWDVTNTSSDYCGWYGISCYDSQVTRIDLRYCGLSGTLPAGELCTSLLSLESLKMSSNALQGTLPNPLAQCSALEELELDGNNITGTIPPEFSQLLSMVDFDVSFNHLVGTVPATFSAWTQLETFAIANNNISGSLSPSFESWTTLRYLYTYSNNMTGTLSPVFGAWSILITFKVDSNRFTGTLPSEYASWLSIDVFSVSGNQLTGTLPPQYASWGSSVTFFYVNDNSLSGSLPGDYSTWSSIVEFNVNINSFTGTLPDTYSLWSMVTYLFIASNRISGSIPDSWADMQSLFSLQLYLNSLSGTLPNSFAKLGNLASINVAFNNLSGTLPVAAWAQRQRVQSIIVQDNPYLHGYIPLSWN

SEQ ID NO: 2971 - protein, 1042 aa, Bodo saltans
MTSMVALRCFLNSLSGTLPPEWSSMTQISTLALYINHLSGSLPSEWSPMTGLTNLQLYSNSLSGSLPSAWSSMSSVQLLYLYSNSLSGTLPSSWRNMTSMIDLRLYSNSLSGTLPPEWSSMTQITTLALYSNKLNGSLPSEWSSMSSLQVLYLNINSLSGSLPGPWSSMSSLQVLYLYSNSLSGTPPMLWRNMTSMIDLRLYSNSLSGTLPPEWSSMTQITTLALYSNNLSGSLPTLWSAMSMQVLSLHSNSLSGSLPSAWSSMSSLQVLYLYSNGFSGTLPSLWRNMTGIIDLRLYSNSLSGCLPRSWAGMSNLRQLSLQDNCLSGVVPESFVNLSRLTTFGGLNLCNTKVRGGINVSTCTGGDWPTACYWLVSQSHTLVSLSPTDRRSSRSSTQSPSDPMGTTTASTASHSRTSSRSPSILSKSTTSSIVQCALLPSETIEVLLTPLTDVAELLLTSSLLAVVVSGSSYTWVNSNDTTLHMIGSPIERRVLTSLPYVGLNITLRGPLNTVKYWKVGNVSLPNHQLLSYNAASSNTVTWNAVVLEPPAGGWIGASTPLMTAETFLVNVSMICDDSSMLNVLVTIPAPAVSQEYAQRVETSAGYAQIASIIAGGASSGSALGRVMATRSMVLCNANAAIGGGVADFDLTICGARTDDDDAGTAAVTAGSALVSNVVIILIVIAAALLLSAVWAWFTSKGVRAAICDLCLPSSLLSVWITVVPSCTSSAVFLFARVNRSSCVGVDIVLGVLGLLMSVVPCGASALLWSSRVCGGERAPWVCLVKHENERKYLRQVPRHLHRLLRRRYEWQSTADRSSTSNDMKAAWVVLLEYRELRYCALDACVLCAVSCITVLSGLTGSEAACRGWSMVAVLLMVAQLVVLCAARPFTSIFSTMVAGVTLFLTVLSSLSQLVFLWAFATNTSGLWLVDASAVLSLIVVGVSSTKMALDFYQLIAAIRRRLRTITTASSQNDDHGILRTSSFLTTKPNDFGLRDIVKEIHGSPEVTCPTAFMMTEVDEGIFWDPSGAALGTELVNEHSSDILR

SEQ ID NO: 2972 - protein, 1036 aa, Bodo saltans
FGNALNGTIPSSAAQWTKVQSFDVGFNMLTGTLPPELGVWTDISFFSIASNSFVGTLSAEFSRWVQLETFFAPNNKLTGTLPPGCGMWSQLSLFSIAFNSFGGTLPMELRMWTLLRGFYIGSNSFVGTLAEGFRSWVRLEAFYASNNNLTGTLPASYISWTSMTEFSFEYNQLTGSLPAAYGRWTGITVFGVSGNTQLSSTLPSAYSAWVSLSTFDVSGARIHGTLPPEYSAWTQLGSLNVSHNQLTGSIPPEYGPSWINLVSLDVSSNQLAGTIPAALGHWTMLELFVVGNNSLSGTLPVEFSSWTGLVTFRVEQNAGIVGSLPPQFAQWLKLRIFYAHETGISGTLSAEHSSWTALRQFWLHSAHVTGTLPPQYRSWVKLQQFVLHSNSMTGTLPPEYSAWSDALFISVRNNHLQGSVPSSWAAGMRDLRNIHVASNSLNGTIPNTFGSLPYLTSISVSDNNFSGMLPTFHSSLISLVDIQHNSQLNATLPPQIQIWTTCDTQIPCSLSALPMQYCLPPNFDLTTLYTGGVDIPGVIGMIAPFRLNKCWEPPLPSHGPRGDPSMSSFVTKTLSLGAPQQQPPTLSSIFASYQPRIAPSAAFTVALSIADPVTGVGLAALGLGRCAPAALREATWYSQVLLSPFYHLGPGVSVLGNIGLCFVGFAMHCVAVNFLTKKKKCRHVTQDEKRSSRSSLELSTAVEVSLRFPGLSLAATLFLARGIAFYGGQSFIDDSDSSVSTSNGNDAIGLRIMNSILSMIFLIGLVGVVIWAERRGLTKPLKFERYRAAALTRLRWVPRWILPIGRWGPDDARRRLAAFRGPVAGGRENFAMLPAGVGIVGSLIVGAVPGTAGGCIAQAACQCLLLGGSVIAIGVLRPMRVPAAGWLLCSTLILQACINLCIVVGRTTDAESAIDAMMFLSAVYSVVGLLRVAHRIIVWYWERGINPKRDIFDEAKSNISPSSNLSPCNSACNTLNWHRSKQEVRSCSHLTNEGGERTATQSGPRRSAPDSEVQLNHLEKLLHIICMRSSDARSML

SEQ ID NO: 2973 - protein, 2168 aa, Bodo saltans
  misc_feature (1623)..(2082): Xaa can be any naturally occurring amino acid
MQLPASSLSYSMTVLSSTITVVSSTSARLTYLALTTSTADVSGISRLTGVGLYSCNLGDVGWTSMSGLTSIVVSSNMGVLPSWTGVDYPALQSISLVSQTGTASLPTSWATIQSLTSMSISYCPGITGTLPTSWSSLTNLRTLFIVTTPLTGPLPNTWNGLASITSITIMGANFAGATLPSEWTSIPELTSLSISNCGLGSPLPSWPTSTSMTSLGLQSNSITSPLPTVINGWSSLTTLDLSNNPINGTLPAWPEMSSLVTFYGYSSSILGPLPLWGSPSSPMTSLQTISIANNAIRSTIPESWTQMSSLNNLYASSCGLLGQIPLTWPSMVLKTLSLSGNVLSGDVALLAFSSTTFSTLDLSSNAFGSSCTLFVPPSLKYLALNSNLCNGTHPNWSSATSLTYIALNDNSFSGTLGSIPSTGLQTLRIDQGNYFTGTLTSLSAFSSLSEISANNNWFSGTLPLFHTGARPQKLQFAANNLSGTFSSSATELNSIQYLDLSANHFTGEAPSLSFASSLNQLNISLNNFTGSFVLSSSLSSLTVLDVSCNFLTGTIPYWSYSDNLAKVNLSCGNSFSGTMRPLSFYAYKSLVLLDASDQGLTGELNSIIPSLAFLYVTSILLGGNALDGTMPAFLSWQTLERFNVSGNNLTGSLTLTTTAYPPNLWSIDVSNNNMLFGTIPVPSASGLLNFRHFLLGGDRHAFSAWVPPALNTKFPRLTQFSLSGSFFGFTLPYTWLVGSTAWASLTTLRLRKCGFSGTFPRQLASTNLILLDLSSNQLTGALPADLPTYQPQLASLNLSLNRFTSSLPTEWLSLSHLKHLDVHSCLLSGPLPLLPIGMRVVALWDNGLSGSLPASWGSMTNLQTLDLTSNSLSGTLPSSWGDLVSLQTLNLSSNQLSGTLPVTWGILPYLQILGLSNNGFNSTLPETWSSMAGLATLNLSNNDISGALPPSWNNMTSLHTLYLSNNSLSGALPSSWGNMSSLKTLYLDHNTLNGTLPASWESMSSIHTLNLTFNDFTGTLPDSWGKMTVLHLSSNTISGTLPEIWGEMSNLQTLYLDFNSLSGELPSSWGNMMDIQTLYLSNNVLSGAFPSSWGKISSLQVLHLSNNSLSDALPTWNISNLRTLDLSYNSLSGTLPIWNNMSKLITLNLSYNKLHTTLPASWGTMKMLNSFNLEGNALYGTLPASWGNMSSLVEVNLASSNLTGTLPDSWANMTNVQAFHLSNNSLSGTLSSLWGNMTWLQELHLSNNTLNGTFPESWQNMSRIHTLNLDFNNFNGSLPDSWSKLTALQTAHLSSNTISGTLPEIWGEMSNLQTLYLDFNSLSGELPSSWGNMMDIQTLYLNSNSLSGTLPPSWGNMFWLQSLHLSDNDLQGRLPSSWVGGYFNEFRSLYLSANHLSGPLPELASSSASSFLVFDLSYNNIGGYLPASWGYMSWLQHLDLSSNKLEGTIPVEWGWMGYSQRRPLLNLSFNVHLSGVVPSSFAQANKVCLSIFETLIRSERRFDNNWSCTWPFVSQTPVTSVTSSSSVSVVPVVVPPPDVTMKTAAQVSSGIGAALAVVAAAPSSGFAVDRLTTLSGFGDCDDAVRPTVQNLMTNGVPTFLDAPLQLSFGDEFGASQRGTVLGXXXXXXXXXXXXXXXXXXXXXXXXXXXXXXXXXXXXXXXXXXXXXXXXXXXXXXXXXXXXXXXXXXXXXXXXXXXXXXXXXXXXXXXXXXXXXXXXXXXXXXXXXXXXXXXXXXXXXXXXXXXXXXXXXXXXXXXXXXXXXXXXXXXXXXXXXXXXXXXXXXXXXXXXXXXXXXXXXXXXXXXXXXXXXXXXXXXXXXXXXXXXXXXXXXXXXXXXXXXXXXXXXXXXXXXXXXXXXXXXXXXXXXXXXXXXXXXXXXXXXXXXXXXXXXXXXXXXXXXXXXXXXXXXXXXXXXXXXXXXXXXXXXXXXXXXXXXXXXXXXXXXXXXXXXXXXXXXXXXXXXXXXXXXXXXXXXXXXXXXXXXXXXXXXXXXXXXXXXXXXXXXXXXXXXXXXXXXXXXXXXXXXXXXXXXXXXXXXXXXXXXXXXXXXXXXXXXXXXXXXXXXXXXXXXXXXXXXXXXXPSLLSRPPSARLNVCVEVLFERLPQSTSEREDRRPTFCCMNGAIVNVWIRRRTSQRANNNVRKFTPQVVHQILSVFIHGAQQSMRK

SEQ ID NO: 2974 - protein, 324 aa, Bodo saltans
EVLRRHKAVPVIPKICCILLPPCCCCCFLLRKAALALTDCLSCVHCSPPLAVIVLRALFSATGGDSGTWHQPMPPWDFNAADAPCSFGGVLCDQGDITNIELPNTALIGTLPIPELANLTAMRRFDVSQNSLTGTLPGELGDAWAHSLEAFAVSSNYLTGELPSSFAKCRKMMDFRVNNNNITGNLRDEFGNGWGSSLASFAVSNNSITGTLPDAYKSWNNITIFWVDQNRLVGTLPSSYRNWTKITEFYVGFNLLNGTLPSQYAEWAVIDRALFNDNQLSGTLPAGVCSVQQFSYRGTSRNVRHVVERDDSRCRYELLDWEPS

SEQ ID NO: 2975 - protein, 118 aa, Bodo saltans
MTNSSNWFGVVCTASEVVTMILSNNNLTGTLPPSLRMLTKLSYVLLNGNHIRGTLPASYASYERPTSSHGSASKIPLSPKVARIQSVGDALELSSSSFELERANAQFWDASGTARVLK

SEQ ID NO: 2976 - protein, 947 aa, Bodo saltans
MLSGSLPPEWSSMSKLRQLYIFGTNLSGTLPSSWSNMTSMENLRLFSSPMLSGSLPPQWSSMSQLNTLYIYATNLSGTLPSSWSNMTNMSNLQLFSNPMLSGSLPPEWSSMSQVSVLYIYAASLSGTLPSSWSSMTRMLDIRLFSNPMLSGSLPSSWSAMTSVQLLILSSNAISGTLPQSWANMTQLTLLQISSNRLVGRVPASWLSIPLLQQLNLQNNCLSGPMPATTSPLLLLQNAINVCYTKVRGSGLNVSRCPGYQWPEYCNGVVSHTRSDSVTASATKSHLLSTTTSTSLSDTSLPQPTASMGTSSSVTMSSTVTQWVCYVTGGAVLVQLAPLVASVDSGGPVAYVVSANSNDVANRAGFVPFVRLATNSIPRATLITSGLWIAMNVSIATPGGGADRWAVGSVTLSGDALNWTAQSSNTVPWSLIVLKTPVGGWLDASVSMLADETLDFVVTMLCDGAEILEVSISVPAPGVPRVYAEEIATVGRSSQVASAVSTVSSGSALGRMMATRSMVLCDADSAVGGGVIDLTLEICGVSGESNVVARSAIVSNWVFVAVALSALLLLAALWAVITHTGLLEATAVLCMPASLSPALVAVVPSTASSATLLLARLGASECVALDVVLGIIGLALSMLPAVGFLHLWVVNANRWMTTAHASRAPPTLHPLMAMLKQILWRRWEWTTTEGTHARMERVWPVLLEYRELRYGALDNGVLFGLSIVSVVSGLTGSTAQCRGWSIFALLLLVAQLAAVIILQPMTTTFSQVYAISTVSLTCLGVLSQLLFVLTVESLWLVDAAAACSLAVLGLSLLTMTLNVVQLMAAVRRRIVMLPKVRSERAESLLLDRQSKPLIAVDLLLEDKSLEVDADDELRQSCDDDLDAVMLKAAAEESDNESHQLCDSGLFWNSDGAAVGTELVEGHSDIIRTDELLEQLMAQSYDRYSPTQM

SEQ ID NO: 2977 - protein, 166 aa, Bodo saltans
MLRSCSLSECPPLLVRTCLADSFATPLTPHHSLSLCTRQSRKVPRNKPSRFERFSPTVTPSHIFFSFPSSSWISPLLTIPPFLALCCGCGYNGSTTTTDHSVRFSVHKVVANINALVQSHSHSRCACSDVQEVSYSKMQKTLLSPTLISQFPDVPFHHVEISSQNN

SEQ ID NO: 2978 - protein, 757 aa, Bodo saltans
MAQDVASLRRQLAAHNTQDSKRSTLESRIQVLKEEVEAEKNRANSNAAKHEVLVAQTEAALQKWKDAEKDWTSSNHRLAEEINEYKTENLSLSSELLRVKSNLEREQKNAHTQSLEIEGMIATIKTINSCWENSKAEGLTKSSEVTMLSSECERLRARNGVLVSQTEELARIKKQCEAQINSLEHHLEERNAFLNGSRAEASELRLQLSELTNKLDNTKQQYELFRDEAEHLKVQLALAISKAHEQADAHNRNVQDLSSTENFLRGSVDTLQERVKELEEVKVTAQALSMQNTSLHNTILELNTSLVQMTKHKDELAALNEEFSSTIHDLEQQLGESKALNDALSIQNEELTTQRSQADETRRHLADNIKQLTETCTTLRAEIHVHEEAHAQQTRELEKTMSILSQTETMSQQQQGQAQQDHIAVERELASALNVADVLRAEKFEMESNYRCAIQQADEAAQALHAEMSVIKSASDAKDRLILQLEERNQAFEVQHMTAAAESAAFIAKLTTTFEAQIADKEQAALRVAARVESLEASLTSLEASHDKTISRLRDELSLKFNKERDVVVVLKQKLSSQESKTSVLKEELSQVTAQLQEQTLNAATLVSSLQEKTAVLTTLAQRKDEYKAKALRLEALQLAQVEENKSLAADYKSVVQDHNSMVRAANRQYCQLRNGLKAAHERVVALTQSSDDAVQRHLTRHGVQEFSAQLAKLVLETKPTLDPSRKAQQPLEQSPANSPPPQKRHRPESQLDATYQ

SEQ ID NO: 2979 - protein, 1103 aa, Bodo saltans
MKRCSSTHFCLQGLEHKLPLYILQVTLVPFVYSRSTETGELPVALTMTHMIHRMVALFLFSLLPMCIDAQVHAAGAVSERELNALNAFFHGLSLPVETNRSLACRGGVVCTSINVNESVVTELKFDARSLSGTLSPELSRLSHITSFNVGGNSITGSIPQEWSAWGASLATFNTNMNHLDGTLPSSFSNWTSLQTFAVYNNSLGGTLPAEYANWTQLTTFTVANNNLTGTLPNKFGNAWSNLRTFQVSANQLNWTLPESYQNMTKITTFMCDENQLTGTLPASYAKMSSMIDFFVLQNSFEGTLPPEYSAWGTTLQTFRVQNNLLSGTLPPEYAQWARIDTFYLKNNFFTGTLPPQYSSWTSLTRFTLRNNRLSGSLPPQYAEMTALNSFDVSQNALSGTLPSQYSKWGIAADQLDFSHNQFTQTLPETWTSMTRMRTLSVANNSLSGTISYFPNLEALSASFNNFSGTLPSKYLTFTSWDLRILDLQNNAKLQGPVPTFSLLVIASVCETMLCSSKSLVSTTLPICLPGLLNLDLSTVGQNITDYMQFANRNAYPLSTCTATTTSVPFSNDPSSAPDSIVKLNNSPRSVATTTFLAAAAAFASLSMDAADLQMLSALMSSPCSCNNYAETATSTTSGSSTTNEIMQIALSPFSVFGSPWAAIGNSLLCTGLIAVHVIVVWVALSRPSLQDNNKSIIINKCTAKRPRSKEKYVEVEHDATCLGRVLGGQRDERRPYRQELMWRFRFPNVSICVAMFFIPGIVRAVCDVMDSIVGEHGDTFAASPEAIGALTVSIPFVIATSSAIYCLIYRHVDHEQVNYDGAADMVRRGRQRRRSAPTPSSCHLHFSYHSSIAKTFSPIPRRVSRVVLPIGIWMPPSARMSYGSIVAKYTDRWMHAWCVVPLANIFVQIVSAIRPPLCNGTQVIIMVMLMCVSVFFVVKHPHRALLAAYLTSLALALNLVTTLMSMLCRLGVVSQGTFASFGLFVSVALMIMKLYHVMLPFVEQRFLDRNVPAVISTTTPNSLQSSTSRQIRKKSSSLATRNDGGSHRAASQQHDVAVMSPGKGQSTDCHQRSRQDDALRELISLIVNGHGNINEFGSQANNH

SEQ ID NO: 2980 - protein, 1040 aa, Bodo saltans
MRKVFALLPLAVFVLLTTCGVMSAVELSIEEANILAEFFVATQYHNSSPVTPANACTFWLNLVTCTDKRDGSDSITISSLYFNRQSLNGTIPSSISHLTQLHTFVISNNSLHGTLPPELSNWKASINMFDVSSNSITGTLPASYSSWTMLTLFDVSQNSIAGSLPDEYSNWSGLHSFLASFNDQLNGSIPNEWALKWKYVISFQVASNALTGTIPDFFSNFTTLLTFDVSLNFLTGAFPSEFHRNSPLQLMSVHHNSLSGTLPARIAPMLTALSYFSVATNYFTGTLPLEYAQWGRTIVNFDVGGNQLTGTLPSEYSNWTSLTAFRITSNQFHGTLPAAYAAWGLSLLNFNVRNNTLNGTFPSEYSSWLHIQTFDVALNSLSGSLPSSFSQWSSIKRISVFSNQLHGSIPEAWGRNMTALSQLLVGQNNFSYSLQPLSFPKIEILSVSFNNLSGTLPGSDSWPKLLFLDVQNNSLLAGPIVPRFVTTICATRLCVNSTVPTFPAPTFACLQESAFANNVGGDPLESLNFVAKFPYSPTLCSSTTTVAPGGQQPTPSPPNSWDQGRVAEESPWRSTSVAVGILTSTAALVSTIGAVGAADAQMLVSILGSPCVCSATTPAQHRKGSLLLLALSPFSPLGSAWAAIGNSLLCGVLVGLHIFCLRLMSSPRSGASLRNSNGPRNSMNRTLLDRWMTEGGVAHCGDRRALLARLRFPDVSVTLLFLLVPGIVRAVVDGSNQLESSFVDESMGDDDELSTSRELHASALAVGVVCVAIAVCFVEIVAYRHVEWEVSSSSSSSSSSSSSSASSKRSRRHFLRFAYHENPTRVFAPFPRSLSTVVFPRGVWAPAKSRRAYGGIVSSYVGRWRRAWVVALGGNLAVQVLSSIDGSGSSCDALQSLTLCVLAGVCVFIAYARPHRALLASYLACASLVLTMVTVLLGLLCRHGAVSEDAVSGFGVFASVAMFVFKALNGALFIVDKKLLRRNNVSYNSEIATDVKVQQRREARQHKITVEQVERLQKLIEMACGIQLHSVQTVPTAHHR

SEQ ID NO: 2981 - protein, 583 aa, Bodo saltans
MTQSSSTSLVPTSTRTPSIPWTATMSFTSTPLHTSSRTIQTMSMRESLTLSLSISARTADATVSHSGEASPSPSSSHTTTATLTLSRWLSASTTLSLSKTKSNTQHSDSSTPTAQRRTTESLQPTETLSLSKSMTLTPSISPTMEATATKSPPTRSKSSTRFDCSALAWGATSVALVQVNTSDVTRAIRPSFSHNSTFFPLMGSTTNESKATRQDQTLREATPFVFLTSQDVDRLTLLQAPSLLFNLTLASANQLVYYYVGNVTTIQGTNVCATWSVRPRSGVWHGVAVEAPSSGWVRDGVFPVLLYTELNLLVPLMCGDGQAMLTVVLTVSSPGVPRVLASEVRRATQAALIAALLAAGAVSGSALGRILATDGTVLCDADAAGGGGVIDFDLAICVESPGLVEARSAILSNFAVVAAVCVLLLLMAMLWSAVTNLNSSSSQSFACTATDVFLLPSSLLPVLTTVMPSTAVSTTFLAACIAKSPCVGVDALLIVLGLLLIIAPISALACLTVNAAACWTCAASPPSPHDIDNKGKLRTLKLYLQRATRRGWKWRTQGSAASLRPAWVVLLEYRVLWYAAVDA

SEQ ID NO: 2982 - protein, 392 aa, Bodo saltans
MKLLLWIAFVAFIAQEVFSATPEAQRAALLELYNSTGGANWVGCGADWGSTTVPPCSWFGITCDGANVVGLTLVDCGLRGTLPLGLSALSHLQYLELNLNSIFGTLPDWTGFDQLLSVGIVNNSLSGTLPPSWSRFTSLQSLSLQYNTISGPLPAAWGNFTQLQSLQLSHNDLQGTVPSEWRGLIQYSIDLSYNSISGDLPSWDDSVFPDTMGTLDLSNNQISGTLPEWKFIFRVTALILASNKLTGTLPLSWTGANYQLLDVSWNHLTGSIPSWSGNAYNLHLQHNNFSGNLSFLTNMNENVDVIDLSDNSFTGDLPEFQYPNWGCDQLTCKCSMNLQNNFLRGSIPQIYCQLMSNINLAGNCLRNTTLPANCDQNSPSCGIVVTSQRQTC

SEQ ID NO: 2983 - protein, 614 aa, Bodo saltans
MLPTLRVPKLFLDAQNNTLLSGPVPFGIVSACGTQLRKQPIQFPPLLTTVCFPPHSSGLVDDIDNTNLSDLTQVISLMAPYVFTLQDCCSTTSLPSAPVTPPATSEEPVNSLAPGVSSSTKDAAAAIVTVTVIMSAISAIDASDAQMLAAVLSSPCTCQNGALSTTTSTSSTTMLGLSIFSPLGSEWSVVGNVLLCLTLMAIHGLCVMAMPKPKMNAQSDVSSIETPRPSRLTWWRNTPHYSETLDQISRLRFPNVSVAMVLLLAPGVVRGVANTSQNFANASEEKNDSSVRLRIVAIVVGIVFLACTMLCLELIVYQHIDDEMVNLEDRTLPSSSAAMRRKRGMTHHQRRFYYAPYQQIVKVFAPVPRLVALIALPRGYWGPDAARNSYGGLVSKFIERWRRVWVVLPISNLIVQILSEIEDQCSVTQSLTLCILLATCIFFFTAVPHRAQLSSYLTCLSTGLTFVVAVFALACRLEPNDVSMNDVSSVGVFASLVAMLCQVYNIALPFVEQWLLRRNGAIPLPLLTDTQSSNSSFQHTMKEVSTTKTSLPMKSARTLIHHHLAEPQRVEEEVSMRQNQRQQRQRLLALRELIELVCSTSQEPASLSQLWCVQ

SEQ ID NO: 2984 - protein, 189 aa, Bodo saltans
MKLCNAVITLVVAVAVTILHSTAAENCTCGLARNQQLLQQFNVATGGATWYILWTGSDICSWTGVTCSGAEVIGLSVANNNLRGDFPGEILQNLTSLRTLYLGGNQLTGSRTLASMLPHLQKFNVYDNNMTGTLPSEFGAARAPAMTIFIVGLNQFSGTLPESYSSWTLLTQFDVYSNHLNGTLPEGFW

SEQ ID NO: 2985 - protein, 291 aa, Bodo saltans
MWSYLLMSSFVRTLLIASVVVLYASKATTPMCGCMDQANVLMDFYHSSNPAGWTHSDGWGSTNCSIPWYGVTCDGASIIKIDLSSNNVAGTLPLSWSSLIHIVGLYLNDNPTLSGSLPPEWSSMSQLTTLYIFLTNVSGILPSAWSNMTQLQHLNVCWTNISGTLPSSFSNMTRMVYLQLNSNPLLSGTLPPEWSSMSNVVTMNLYENNLSGTLPSSWSNMTNVMYLQLQSNPILGGSLPSAWSSMSSVVTMNILATNVSGTLPASWSKMTKLSHLQLCNNPLLSGTLPTT

SEQ ID NO: 2986 - protein, 193 aa, Bodo saltans
MSQSTEMDLVGCAMTVVLTNDTQLSGTVFTYVPENEILVLVTDAGLDTQGFKMIRTPFIKSFTVDQDFKSIPASQRLPQALDAYEQLPAVSKNVRDWNAAKKYLIAEEKSREKKLSSLCESTPVSAAEIFLGIARVYPNTKWSAEDQTLTMEDIVVVGEPDWSHPVVKVIGNLESPNKERVENLIKKILSATD

SEQ ID NO: 2987 - protein, 855 aa, Bodo saltans
MRSQHAKKRSTTGLKMQVTPRLVWATRNGIFVGVFALFCIALCLPQYVQAASCACQDSLATLTALSTALGGPGWVFVWDTSSSANVCNFYGVTCASSGVITSIVLTQNMLTGTLPGAALSALTGLLVLDIEGNRVTGTLPPEISTLTLLTKLNIKSNRIVGTLPPQFSAWSSMTYLSVGNNNISGTIPPQFAAWARLQFIDLQSNAISGTLSAAFSAWTSIVSFSMCCNKITGTIPSSWSSWSSIVSFDLGETSITGTIPAAFASWTNLQYLSLSNNWLSGTITSSFSAWTSLIAFSANGNQFTGTLPAALSAWTALSVFRVSDCRFSGTMPAEYSAWTQLTTFDVRNNSLTGTLPSNYATWSVVAVMDMSVNSLVGSLPAAWGSSLRWLKYLGLLSNSVSGTLPSSWSGLVNLTAMLLGGNALSGDLPSAWGSLRLASLILQGNAGLTGSIPSSWSSIATNGVVAICNTIICGAASATGASTFSCLPSTSLQTFSYATTITPPSGTTFTSNVPCSTAPPSTSTAIPATSTTSLLTTSSTTAPVTMTAAPLTTSTVAPAIVTTTTSVAPGVTTVNPASTNVATSLPGSTSASPVAANTTAPTATAVTGALESTTVVPFGSTAAPTDTAAPSILDSVTNVTIVLRISGTQWALVLNVSYAAVVSSVALDIAISLNVPVTSIIIHSLSVGSLVVNASVDAAALTNGGVVSTAQLSSPDTVQNAVQSMVSIMSFEVVSSVYGNTTNLTEPNLSLASISVTSTVVKTTSAPTQSQDSAPDTSGCDNTCVGLIAGLGGGGGALLLIIGGVVVYKKRHNGPSRHIKDDGGVLDHAAINQAQRENAKPLVSSSHDVDMLDII

SEQ ID NO: 2988 - protein, 1129 aa, Bodo saltans
MSLVSIVLATTSLLILLLLLLIDAAVEGSMCGCERRFPVLMDLYHATNGTDWQLLSLGGTTTNTWGTTTTPCSVDWTGVTCDGSDVTALMMAAFGLQGTLPPSLGNLTGLRSFSVSYNDQLTGTLPASFAGMTSLVTFSAQQCQLTGTLPAEWAMLRKLSSLYLTSNVLHGTLPSEWGATMQALMVLDVKNNQIAGPLPAQWKGLKETLKRLFFANNSIDGSLPMEWSELQKLTDLDLSFNALTGPLPEEWSQLASMQSLSLANNHIHGTLPPTWAGGFGQVDSLFLGNNSIAGTLPDTWWQYSSITLLDLQGNQLVGTLPSGWAPLTLKTLQLSRNVLNGTLPASWSSLEFITSLYLDGNGFTGSLPESWGDISTLEILDLTNNRLKGTLPDSWSGLTSMSILRLGNNQLEGQLPVAWGLPLGSCIADSFFFSLLDISGNCLHGTVQWNRIIPNILVINNCRTHVAYVNVSSARYVSMLCNSTGINDDVMMRWPQYCASRTATHSRSPSLSLRHEEDSKTKPQPQLLVRSNSVSPLSLSRSFSMVDDDPPRSDDHINPNTVFTAMKSANTAVVMSALVTSTSSTAAVARGAVPALQRASTALRFYELCHNAVAAGGAADDDNDGPMFSSFEENPLRIHFGVGGGNSVDAASTQVDDEAVAEDYAAGAAVGNSLMVVIIGGLSHAIGLARIRWRSKSSDASPGVSHAFLTVLSAVLPSSLLPGGLALPYNSLVQPTVSACIVLIMTKMNASAGALSIGVIALTLWVALPFYFASEVLWNARRLSTVSSTTKQDRNANIHCCSCFASTRRSFPFRTQPYSSPIRSSKGGEREVGLRNIISQSKWFVFFLTPTEVWVHPSHHQRAIYAASSSNNNNNNAQGMRMTMKRLYERIEPLIEPYVAQREWYFLVEWSVSIISGLMLGIAQVIATDDGNNSSGDYARRKNACVASQLTAWSGVVLGVLQVGLTLGLWPMQIRLEIIVVVVVCTLIAVSQLVLALADGSSSSAAAAAGIILCATVVELTAMALTLLREIFFFVGKRRSASSSAAGLLMMQRDEISTEAAVSHHRRSRNGGGDDHNGVVAQPLLVLGCSEVEVNNKRHQQRWATTTAKTDATLKLLLAMICDTVEQSN

SEQ ID NO: 2989 - protein, 489 aa, Bodo saltans
MLCDGAEILEVIISVPAPGVPRVYAEEIATVGRSSQVASAVASVSSGSALGRMMATRSMVLCDADSAVGGGVLDLKLEICGVPGEPSVVARSAIVSNLVFVAVAASALLLLASLWAVLAHTSILQSTAVMCMPASLFPALVAVVPSTAASATLLLARLGTSECVASDVVLGIVGLALSTLPAAGFLVLWALRANRWMTSVRDREAATTFHPLVAMLIRTLRRRWEWNTTEGGRKGMERAWPLLLEYRELRYGALDNGVLLVLSIVSVVSGLSGSSGQCRAQCRAWSLVALLLLVAQLVAVIIVQPLTTAFSHLYAISTVSLTCLGVLAQLLFVWAVDSLWLVDAAAACSLAVVGLSLLNTALNAVQLLAAVRRRMVLCFELRLKHAQISVGPDHQNRSLEAVDLLCGDKSLTVEMDAAMLMMMTEDADGELYQPLADGLFWNSDGAAVGTELVEGHSDIIRTDALVERLKAQSYDRYASAKVLAYECNS

SEQ ID NO: 2990 - protein, 1183 aa, Bodo saltans
MSYTQHLEMHSASYLGTANMLTTVVAFVASVVFMTAGAQDLPVCVCDFRKAVLQDFYTATMGENWLLPASKRWNFAASVCSFTGVQCSNATGDITAIELAASGLSGSLPDSLGQLANMVLVNLTSNAISNSIPATLSNWTSISRFVVSNNKLSGSLPSSLKTWHSISRFSVASNQLSGTLPPEYAEWGRVETLAAGPQGIGRYIDFSFNSLHGALPEQYSAWGDSVVLFDAEDNMLTGTIPAMWASWSRIFFFSINNNNISGTLPPEFKNWSLVRDFKVGSNDLEGTFPVVYSVWTNLAYFWTGSNNFHGTLHTEYKAWVGTQELFVNNNNLTGTIPKEYNVMTQLSSLIVNSNRFSGSLDDSFGPSWRLLVRINAHNNSFSGTLPSSFGQWTGLINFRMSNNNFTGTLSSLYGAWTNMVLFDVSFNSLTGTLPSEYGSWHVATSFVINNNDFSGSLPDRYGPGWTSMLTVTINNNSLSGSLPSSFSLGKTILNFYASYNAFSGTLPESWSSGMRLLSSLFLDNNQLSGSITTAFTAFSSLLVINLAFNNLTGSLPSVVKWPGVYLIGLQNNPHLHGAIPSSWGESGTFSVVFKILAVCGTELCGNASDLGFPLGFRCFTRPIALDNVMSNPLSLLSLLTDASFSVPSYTCLAPLPTPLPPPPPPPPPVSFVDGTVKASIGTARAVSVYSSIVLTFVASPGVQTGMKMSLLQGALTASQLSRLCIIQSDDSENGLEEQLAPFLDAANNPLRLTIPGIDDDGDDAVAGSLIGNTVLVVGLARVRKSFDISQRLPCLNVISNVARTLGWTKRSNGNSHDEVTLLPATAATSYFMFLQPTVMNAIVLFGIGGGAALGISIPVLLLWLGAAVSVFHILRKQLYVALPRGIVFVESGKKTTRAAATASNSNAASFIEKAIKLIGAPRGEWTVSTDIKEVSTSTRRRSLQMFLKRFRAFIEPYVSEHVWFGVVDVTIMILGGFVQGVAVAATNSDPTTACAAFYGSTAVMILLVLIQMVLCVVLSPLALRFDALMVLVLGTVSVISEIFSLASQPDAADITATVGFFLQAALVILLPFLNASTEATPARDEKTMTAEEATMTKKREESVRRHSRHSDRASDEQLLAQHATLVPEATAAAFHGAQRENLRRLISMIALKKRPPQRRGQKKKHSGTGTVAGRCDQRVPHSA

SEQ ID NO: 2991 - protein, 967 aa, Bodo saltans
MCQMFASILIQLVALSFPIPALCSVIEMAALVSLYNATDGPHWHCTHDSAAMQAALWDVTNSSSNCCVWYGIRCDSNQSVIMISLEACGLSGPLRSDLANLTNLATLQLANNKITGSIPVEYASWEHIADFNISFNSLVGELSPLFGKWGASITAFDVCNNFLTGTLPEAFSAWSRIHDFNVSVNSLTGTLPCSYGSWTWLFGFSALGNQLNGSLPVEYSTMGAERNGVYFFMVTNNSLCGSIPAKYSSWTSIYTFAVQYNFLNGTFPAELGSAWKNINIFTARSTSITGTLPLEYGNWTMMETFQVADNPHIYGTLPESYGTSWTVVKSIIIFGTNISGEIPASWGRMTTINVMMLFQNKLSGTLPDSLGNLTKLELLVLALNNFSGTVPFKSWGSLRNVQLIVLQDNPLLSGVVPTNWSSIFVVESVAFFPLPTLFICRSQICGPILAPACDYSCTSSDKISQLAATSSTGLVDLLMSATRTRELPCSAAATGTGDSGHRTATLQQSLSITITSTNNVWVEEGILVASSTIAVNTAATAIVLTGSVFLSDSGSGLGNIQMLSSIMSSPCMCPGASVSAERMNYANSPFADLGPSAVVLGNIGCMVAINALHFLAVVALSKHHRGANSGKSPPISKAVALSIVSSSLRWPGLGLRVSLLFVPGIAKGSVALLSALPNSDNGPHAVSGVVGVVVTLFAIGVLEWFVYRRQVVRACRMKFRHTLPHQYAPVSKSMSAIVLPRGFWGPLDAARRFGQVVNGYTGKYKRWWPLSYLPNIALQFLGGILVSPQSSGCDVIQSVMVVTSLCTALVLLTLRPTRVLLTSFLSATAMLLVAMVTFLGLLCRHDVVDAQVVVVFGVICSVFGLCQSLSAGAVTMAEMYFLRRNGAVSDVDPNATAPPLNAASVRSHRQSSSLFVPLADLFRAHKQTGVGDASYAKRAQTTSTTAAANLCHLITWICRSSKSQKAT

SEQ ID NO: 2992 - protein, 232 aa, Bodo saltans
MPLLPLLRNKGTCFLDDSNVLMMCRISVAVYVWLLLCTAVILLLQMPLVAHCACECAWRKPLMLRFYDAVGGSTSNLGWDLDHPDAPCGWDGLSCMNGDINALFLKDKSLRGTLPSFLSELGNLTDLDLRKNSLEGTLPTNVSSWANTLKFLALGETLITGTLPESWTSLKAIDTIVLSLMPGVSGTLPSSYSIWGSKLTGFLAERCSLTGPIPVSWAAWTNVEQFAVGGNV

SEQ ID NO: 2993 - protein, 1199 aa, Bodo saltans
MSSAFRRFSISYAYVPLLLLTWLILSSSGVHGDMCGCEGRYSLLMEFYNATGGPWWSDRSGWTDSPPTNCTLSTWTGVDCNGADVTSIVLPYNNLTGTLPDALGNLTALLTLTLHGNLGLWGDLPSSWSGMTQLTDLSMFGCRFDGSLPPEWSRLTNLNSLWLSGNRISGTLPSSWSSMSSLSAMYLSSNRITGPLPSEWSSGLTSITNIELYGNLLNGTLPVAWSQIITVAIIYLSGNHLRGKLPYEWGLLPNLVNLQVNMNCLSGPIPSSFDAFVLSGVSMNFCSTRLRGGDYLSACVQALTWPTYCIASDSATPSNSPSASMTRTPSVSIAKTPTRHTQDILSVSSTRGPSRTRRHSVTDSPLPTPSRSRTTSPTWSPTPSSRITLSNASASPTPTRSLSWLSCYVAPADVALSLTPFITSIATTNTDDASSPSPTVVGTNASNSVELQGVVFFVLLSDRSNITALPSSLPPFSSSTTGRSGAAISMATRGVSRSVLSTAPVLILNVTLVSPPSAVKWVVSNTTLLSSPSHPSSSSSLNWTTRSTNAVPWSVVSIAPPDGGWISADTPILTSTSIELTLLLTCNDMPVLSLVVTVPCPGASRGLAGQVTTAAGYSQIVSVLAGGASSGSSLGRVMATRSMVMCDANSAVGGGVIDFNLQLCLPVIDQQQHHDEDDDSFSSDNSDAATAARSAVISNGILILFVTLLLLLLSAVWCSMGHVPYATAMSSVFALPSSIVPVWTTTLPSTSAGAILLFARLDESPCAAGDAFIACLGALMSVAPAVCLLSLWWCKARGANAPWTCRKAHHGAVTIDRKAHSLTTEGGDGEVGGGGGGISLSTRWSASAVGMLAHRGLERIWRWRALEGGGEALKSAWVVLLDFHVLWYAALDAALLVAVAVLAVVGGLDTKNQSLCKSVTGVVIVLLVGQLIILVAVQPFTTLFSLVHGAVTISLTCISVMAQLLFIWLSSTSSSGLWLADLSAACNLIVVGVTAAKLLVDVIDLLGAARRRVKVLRSSRYLQDALSLNSLSVHDALMIKGVDHNNTSLEMTMVQPIVFLQPEDNEDHHNDEKQHISDHNTLTNLSFSSRSSSSVRSVVVVATVPQPTSSSTSSGATGDVGAPTLLQDNRLRFADIEGDSDAIIRRFAEAGFWDADGAAVGTTMMVDKIVSNPRGAEGAPDVLLTFGISEEQVTASQAH

SEQ ID NO: 2994 - protein, 950 aa, Bodo saltans
MSFESETKKVRAHVSMATATLIIFLLCTSSVFLFVAPTATAATTCTCVHRSDVLLDLYHSTNGPLWTTKWNVLAADFPCAQPGVSCDGNISDITDLVLVDFGLNGTLPASLGNLTALYRFDVSTNALRGSLPASFGNWQRIAHFNATLNQISGSLPPSYSAWTRMVLFLAFSNSLTGTLPPDYGKWGPTTTVFAVNGNQFNGTLPPEYSNWTNMTSFIVYENNLTGTLPDQYTSWLNSIQNFNIRNNRFTGTLPAAYQVWNRLLQFFVAYNAFNGSLPSEYGRWKSIVEFSVAYNSLSGTLPLSSGNMSSLTMFRVDRNDLTGELPSSYSAWLKIETVMFSHNTLRGTFPADYSQWGSTIKTLDARQNNFTGTLPKSYDNWTSMVSFTVASNSLSGSLPAEYSAWTSLQIFKVYSNQLSGTLPYGYAAWKNSALEINFSNNNFSGAIPSSYSQFLSLSTFAASLNSLSGVIPPDLVALSTMRYFSVGNNQLNEVLPVTAAPFMYFFDVQNNSGLRGSLPQALKGSMVMTCNTQIACPTNFVFKYCFPHEFMISFWELESNEILIASAPHLVVASVLPHQRHHRLRQDLFNLTPSLEAPFRHVSTRFDTFQTATAALTYGVLVSTVGRGALPSIQRSTSALRLARRCAADSAGGAAESEDLSPPLFDSPADNPLLLSLPAGVGEGSESLDFATGAVVGNTIVVIVSAILLQCIRVTHLCFSGEANRTLSNRILTLLLGCLPSARFLGGMSVLYAALLQPTVGACISLIVSPARDSRSIACGALLLLLWIAYPIVCVYFVLVAGRRVPTPSTRAHAGRKLFLLRAVETPSAPMKQKNKEMRKDARGSLLNIRALSVNALKFLFTSSSEWVVRCGQSHRSLRNDEEMLQQRRTERFLLRDLINVFDAYIRRREWYFLVEWSLGFASGAILGAAEARAATASADDGDGSSSACE

SEQ ID NO: 2995 - protein, 928 aa, Bodo saltans
MRGLHEVLLLLSTVASRVSASMCGCESSLPVLMDFYNATNGPMWAQSSGWGSTNCSVSWFGVTCDGNVITQVDLTGNNLTGTLSSLSLVNLTGLVSLLLGSNQISGTMPDSWRLLGQLQELNVSFNNLQGSLPANWTSLELDAVDFSHNQFTGTLAEIYSTGLTSMDFSYNQLMGTLPASWASLVSITYVSVAHNNLQGTLPDSWKTITSPGLVVILSFNRIGGSLPGNWSQLSTISELWLDHNNLHGPLPDSWSTMGGSFSLSTLVLDGNPIGGPLPSNWSGMFNIALLSVANCSLFGTLPSSWQFAGIKQLFLNDNALNGTMPGLWANMGGTDEFSFANISNNCLDGIVPWANLESGDAPPTMDTCGTRLDLATGNCTRLPTFWPEYCSPHPHVHTLTVGTSIKSESMTDLMEQSKDYYTTDSETASDTVPLRSATVLLRSVSQARESLSSPTLLTATLSTGVSMSPALIQTPVGTATAVLAAAASAPLPASAIISAFSGVDPGSAQALLTVLQSPCIISDTQDHQATGELSTQDSVMPRASSIALSPLVLFGDEGTIGTFEVAIGNAGLAMAIFLVHAALTLLHNRHNYEKSSYEEPAWVCSRGAMQHLACSKNAAVLRFPSLSINFALYLTPGVAWAVSTLMSSTTTSVVQVVAGSVVGIAWIACFGVLLTAVVLHCWILDSEYGLTFRDFLDVQPFSPPVPRSIAAVICSRRGQWGPSGRRAAFGSPIATSFLPEHMWWIWAVSPLMSLVAVSLNTARPSQAARTEACDAIQSILIVCFLAVALLFGSLRPHRSMLRSFLSCFSAAHNGLVAVLGMLARHQLAEQDTVLVVAAIGSYTSMVLGVVVVCIGFLEQRLLRRQVNDATEQLWIIPKVTMAHEGVEHNSKDAQKNNIVVEIARRDAALARLIAFACQSHSGDADLWL

SEQ ID NO: 2996 - protein, 1239 aa, Bodo saltans
  misc_feature (924)..(1023): Xaa can be any naturally occurring amino acid
MLRSLFLLAIACATSDIGCAQIVISQDAAAVLSEFFVAVKFKNTTPVTVDNACSEWPQHVVCNASSITKLNFTSQRLSGTLPTSLSRLTGLTYLYVADNSISGTLPPEYSAWGASMKYMNASINSLTSSLPPAYSSWTSLNGFGAASNQLTGAIPSVYEAWTQMFFFDVGSNQLTGSLPATLSSWTMIQAFYAQSNQLQGSLPPEYAAWTQVSSIAVCVNTLTGSLPPSYTSWSRMVTFYVYTNQIDGSLPSEYSVWGSIDAFNVQFNRITGTLPPAYSNWTTRITSFRVANNSMTGTLPPSYALWTRLTQFDVSVNALNGTLPSVFSKWAMLTEFTVGGNHISGTLPREYSAWSQLQSFGVNNNQLSGTLPPEYTAWTILGQFNAQSNQFTSSIPPQYATWSKIGLLQLSSNLLTGTLPPQLANWSVVGGMRLGSNQLTGALPPQYSQWTNINYFIVADNMLEGALPDAYSQWSSTVTQILLQDNQLSGTIPSSWGPAMTNLVELLLSNNSLSGTLPQSTFPKLNLFSFSYNSISGTLPPTTTWPSLQLLDAQNNSLLTGAITFPSSLASATFCGTATCRSSSLSSALIHCYPPGYLSSNINDPAFLFLAAFSYGFNVPSCTATTLAPSSVAPTQQLVNHSTGQTNGGGVSVAAQATSSAMVYTALAAGGGAVGRGAVPGLQRALTVLSLAARCNAANNADGDNSADSSDSSMFADLADNPLDVSVPVGAAALSAAGGAAVLNAVLVCAIGCVLHVLALVHRSARRQPPGATSSSGALRAAAMMLPASLLPGGLAVPYGTLVQPGVGACIALLVSSSRTGASIACGVLMLCVWALLPLYCAYAVVVRGRRVVGGGMFALRSAPCQVGSEDQHKKSRRRNNGERRELALLSSALQMHHHLLLETEKWVLRSASDISDRHADRRXXXXXXXXXXXXXXXXXXXXXXXXXXXXXXXXXXXXXXXXXXXXXXXXXXXXXXXXXXXXXXXXXXXXXXXXXXXXXXXXXXXXXXXXXXXXXXXXXXXXQYASYLLVNMEAVFGGYVGGREWYFAVDLGVAFVGGAVMGGAEAASYDGDACAAALWGTWCAVVLGVVQVVALVALRPNSVRLELWSGIVLGLLGLLSVVLSLAGADEAATTVSTLASILETLVTVVLLLTSCFKQKVRHAPEIKEGELLAPPLPIPTATKRSGTREELLTAVPSSEAQLLVAEEIGGRQSRRTVEAASELRRLVELICQRKHDEG

SEQ ID NO: 2997 - protein, 588 aa, Bodo saltans
MSIFAVGYNQLSGRLPTRCSPTIKALLFQHNTRIVGALPMELSSFSAIGVCGTGMCPSTTLPFQYCLPSEVMFSSQDQSDLLRLASPFQEVCDPKAVVNLRPSRTTTPILSPVHDVAGFPTGASSELLPAMLVISLATGTGGVGLARGAVPSLQRSSSALRAMSQCVAPGEESDEAPPPYSALEDNPLALPITMRGSGDLDGAVSAGVGNGLLVGIIGIVLHMVAVMQQWSSRLTSKGPLLRFMCRIVKALPSSLLPGSFAVTYGTLLQPSVGACVSLIASENRSLASVICGVLLLCVWCSLPAYCLFAVVWRGRRSTHDGKFALECIACAPSARVTRGRQQMQLKERWLALVAHIAEPTHQWTVRSRSGATKATTDFLSENMEAVFGGYVREREWFFIVQWTTAMISGIMQGALETAGTDDPTLACPTAYASCAVAMVFTAGDVITTLWLQPLSARLEMWGGVGVSVLSILSQILVLSDAPQSAGIAISTAAILELLVMTFLMLQVAFVSLRSSGAEKRNTIHNNQVNLRNMQLGRPLARMGEAQQPQQQHHAQVELDVTGHADVQLMLKRLVTMACNDQQSRRWML

SEQ ID NO: 2998 - protein, 211 aa, Bodo saltans
MVEYEQYSSAVFVPQPHHWHAASIMGEHEAAIRLTVAYHHVSGSLPDAWSGMTAIRTIAIYLSALSGTLPSSWSTMTQMGNFQLYRNALTGTLPSSWSSMTSLQLLYLVENSFSGTLPASWSSMGLVQFRLDTNRLSGTLPLAWRSLRGLIMMNLYLNTLTGTLPPEWSNLVNLRELYLNSNSLTGSLPSSWSSMGAMQILYLQYNSLTGS

SEQ ID NO: 2999 - protein, 408 aa, Bodo saltans
MSGPQWKSKWDFSDPNAPCTFVGVDCDIGSADITRIVLSRQGLNGQLPAMIANLTKLTLFNVSYNAIHGTLPPEFAAWTSIAQVILEINNITGTLPPHYSEWGRSIRRFYCGRNNISGILPVSYSNWSMIETFDGSYNQLNGSLPSEFAKWSSISVFVLTSNLISSTLPSEYAAWIRLVDFFGDSNKIIGTLPPEYSAWAIMQLFHCAKNSISGTLPKSYRSWPLIKEFDVQYNQLTGSLPPEFADWRPSLFTLNNNQISSTLPPQYSQWGVSTQYFYLQDCDIYGSLPPSYSNWTYLMGFAIRNSRVSGMLPNEYASWVRIGTFVISYSSLSGTIPSTYNHWSSVTTIDLSNNHLTGTIPSNIWGSMALLTTVALSNNSLSGTLPAQLLRVPQLGYISVGFNQLTGT

SEQ ID NO: 3000 - protein, 2033 aa, Bodo saltans
  misc_feature (1248)..(1347): Xaa can be any naturally occurring amino acid
MDCHLHSGHTVALTARIFLWLTSIPLLLLTPIIIPHASSCGCNYRYDLLMELYDTTNGAGWLNNSGWGTTTCVDDWIGITCDGTDVINIELSSNNLSGSLPASLENMSGLKYFTGDSNAMKGTLPESWSNMSALEVISVGGNALEGALPSSWANLTQLTALWLWSNRFNGTLPESWGKLKNIHNLNVNNNRITGTIPPSWFTLSALESLYLAQNNMTGTLPINVALPNVAVLQLNGNVLNGTLPDSWQQLSRLSELDLSRNQFDGTLPSSWHRMTSLAMLSIPSNSLTGTLPPEWASMSALQLLNLQDNSLTGTLPSEWSSLMSLQSLNLMMNNLSGQLPLSWSALRDLQFLALYQNSFDASLPDTWSNMMSLEMLHLGSNNLGGTIPASWSALRNLSSLFLYSNTLIGTLPDSLSSLSNLTNLWLQENELHGNLPDTFQLLTKMESFSVGGNRLSGTLPSSWSSLVSLQTLALYTNSIVGSLPNEWSALGNLAVLNLCENSLNSTLPSPWSNMSALQELYVCTNYLTGSIPDSWSTLSGLKFLSLRENRLCGTLPNSFRHLAKLQYLSLMSNELNGTLPPLWSSLTTLQTLALSTNAFVGTLPSEWSTFENVQILSLCENSLNSTLPPSWSNMSALQQLYICTNDISGSIPESWSTLKGLQILSLYENSLSGTIPANFSSRRNLSQLYLYSNQLTGVIPDPLSSNLTTLYLYNNSLAGTIPASWSNMLGLQEVLLHMNSLSGPLPSSWCVLPRLQTISAYQNKLIGELPDSWSNLTSLTTLMVHNNELNGTLPTSWSNITSLQNLWVQNNNLNGTLPESWRSLSRLQVFYASTNSLSGNIPSSWGDGMSSIVALSFCVNSLTGLLPEQWSNMTGLRELYLCSNNFTGTLPLSWSRMTSMTTLSIYTNNLTGTLPHSWRNLSNLQLLWLYENNLSGELPASWWQLSNLTSLDMSTNQLNSTLPPQWNRLSRLVRMALSSNQLSGPLPAMWSNMSRLQVLNVASNRFIGSLPPQWGSLTNSSSLTQLSLDHNCLRGALPASWMTATMPNRSLNICNTKMRGGGGGGGNCSAAFVLCDRLNDPLGRQWPSVCDWIVSRTLSSSEEQSSLTASDSFTMTGLEATLSLSRTESSKSVSIRSPSSLSTTSSIIFTGSPSVSLYSCDAPAVDEVLLSKMQSASSLLNSSAETVVLTSANPTTTTGVKTTTTDNIPPILQLQVAALPLDRTVLTKMTDLAVNITLTAPPWWVVLXXXXXXXXXXXXXXXXXXXXXXXXXXXXXXXXXXXXXXXXXXXXXXXXXXXXXXXXXXXXXXXXXXXXXXXXXXXXXXXXXXXXXXXXXXXXXXXXXXXXYATCSRSLSSSLSHTDVRLTSSSTAATRLPSKSGTLLDSFTKSNSLTKSPLHPSVHSSTISFFSCYIPSNTVQAALSSLSAPSPLLVNSTSAVAVVTSDEVSIAINGSSLMDSATTARSMPRTSLILAAPLVFNITLTAPPWWVVQNVTMSLPLPHHHLTWAADSSNTLQWTLLVVQPPLGGWLAPQTSVLMDTVLRFAVTFTCNATPVLRLAISIPAPGMPRAYAQEVKVAGTYSLIASLVTGGGASSGSALGRVMATRSMVVCNADSAIGGGVVDFDLRICVGDGSTEAMVVARSAIVSNLCLVVMMVGTLMGIVVIYSRVKNITVYEALLMFALPSSLLPVWITMVSSSSSSAMLLLARMPSSSCSGADVVIAIIGIVVALVPAGALAVVWVTARRSKWRCNITTACVIVGEGEGQREKNNPFTVTLCWSFVRRSVRRRWKWISTTGARSEGMRCARAVLLEYRKLWYASLDATMLACVSVLSIVSGLGGSDSSLCRGCCGITVFLLGGQAIVVAVTKPFTSLLSTLHAVVTLLLTCVSVLSQLLFVVLSSTDASSVWLLRLSAACSLSVVGISGVKMLCDLYDVFGALRRIMTTAVSRKSVAPVTTNDDANDRCEMVLVVPLLEDVVLLGSDSESPLFPEKDCVDIEESAFWDGDGNALIVAGEGILLERNGMMEPHRVNVW

SEQ ID NO: 3001 - protein, 1168 aa, Bodo saltans
MRSTAPPLLSVVLPILIGCLQLVIPVLGQQCPCSSRVGLLRTFYDATGGDVTWVPAARWNFASPTFPCNASGITCTGTPVNDITEMLLSRKGLSGTLPAVISNLTALTWFDVGHNSIGGTLPPEFSAWTALRIMDCSSNQMNGSLPSSWGAWATLQVFTVSDNRLTGQLPRDYSAWGASVQAVYVDYNRLSGPLPSEYKNWTAVVLFAATNNSISGQLPGEYSAWTNITRFDLGQNSLSGSLPPSYAVWTQLTTLVASSNMLTGTLSPDFRRWSNFSTLQLTANSFTGSLPEDYKVWKKLTYFALGSNSLTGTLPPAYSAWSLLIIFEVNLNSVDGTLPAEYGLWHLLLRFNVQINNITGTLPSSYGNWSNAYLMRFGNNQLTGSLPSEYGGCRALQAFGAEHNRLSGTLPSTYSHWTNMSGNVALNNNELNGTLPPELSSWESVMLFTIDENNVTGQLPSSWRSWTKLISFSVVNNLLSGTLPSEYAEWRSIKDFTIYGNRISGTLPPQYSAWPTISTARFDSNSLTGSLPSQYSKWTTVTRLFLYTNSLSGTLPSAYSLMTSLQSFQASDNRLTGSIPVQLVSIPSLTTLTVGYNQLSGPLPSSCSSNLRVFSFQNNTRVSGSIPPQLPSTALISVCGTGVCPKAGWGYQYCVPRTFSFSTTFVTDLFTELSLYYRLCTSAAVLQNTRTISLKIEPSNAPQQSASTVSAPTRATTSAATYTALLTTGSALPRGALPGLQRSSSVLRMMGACNAPGSESTAPMYSALADSPLALPITIGVTDLESSAGAALGNAILVIAIAVGLHACSAIQGRLSRVSTNASGRSIIAFLPSSLLPGSLAIAYGTLLQPSLGACVALMASVERSPETVAYGALFFMLWLGLPAYCLWAVVWRGRRMTNDGRFALESIRCTHSTGAVLRRQQKAPLLLQALRNLRVRVMEPTHLWVRRSNCGATQAATEFLLENLEPVFVGYVGGREWYSAVQWVSAAASGVVLGALQVIGNDDAALACPTAYAGCGVAIAFGVSDIILTAVLRPMTVPLEMWTGAVVSFLCIVSQALAAANSLDASNTVVTVSALIEVVVMVSLMFGGGKRRISRSDRNNDSAKLELAPPRSSTSTPSATRTTLLKKRGNVAMIQADEEYANLLMGDHASRLKQLVMLAVQSTNYQR

SEQ ID NO: 3002 - protein, 662 aa, Bodo saltans
MITSLVVILSVITCGLSATSGAAVRPPTSTEEVLRRWYFATGGPQWRSQHGWLEAFNSNNKPTATDSINAEEGAAASPPAARRHSIAPLSWCTWYGVRCAEPPRYADVSVHRYITSLDLSDNNLVGEFPVALFCSGSRAPGSTKKKSPFGFDQLTVLNVSHNQLSGSEPFLHSPGPRNTSESSFLQEVECTDATTPSLSTIEVIDMSWNRIKSSLRYVLHAHRRLHGTGRRMPRLRWLSMRSNLLYDPIAAMTFVQSQTANSASRRKSSTASTANFGSVIFPMLESFDAGDNHLIGEFPATSFAQHTPFLQVLKLDNNFFVNSALTWLAASLIGGNRADDADELRWHHTLTTLHLQYNYIQATIPNSVDRFRGLQELFLDGNRIYGTIPRELRSLRHLETLSLAHNYLRGTIPCAKDHWFSELTPFSRLRWMDFTDNELEGNICPVVPSHRIEVLRFADNAFRGAVPPLEGGRLREVTLGGENRWECDLPDPKLIPSWVDPAPSTKCILDSGSGDTSGGGIDALPIKRWGGGGGGGDATPSVIRTDATRRGSWWRNGLLGLLLPSQPKKRDLVDAQPMGPSARHLFSVLLTLVVVTPLSAAFMKLAGVHLPQSSGCVPPGYHWFLEWIGYEPPAATTALPLSFDDDDDSDSQFCTGESDDEH

SEQ ID NO: 3003 - protein, 870 aa, Bodo saltans
MYANWTNLRTFELRYNHLNGTLPQEYGNNGWPPSRFLKILFDNNNFTGSLPNSYKSFIELNFFEGGTNQLTGTLPPEYAAWTQLQYFKVFDNSLTGTLPKEYSAWTSLESFYVDTNQLTGTLPREYANWTNISWFSVNVNNMTGTLPPQYSSFARIQEFRVGPNSITGTLPPQYQSWGASVRLFLGIYMGLTGTLPAGYSVWSSVRSFVVEGNQLTGSIPDSYGERWGSMSIFDINQNRITGTIPTSFLMLPSIAMFVAGHNNLIGVIPSRSTTNVVVFDVQNNTKLTGTLPPEINALGIVTICDTSISCPTKRSVYCVPPGFFASAQAYSVAEVPAFLLSAAKYVYQCVDSVVSPAPTPPVASNVPMERPSRYLPAMTYSALATGGGALVRGSVTGLQRSSTALLLAALCSNAKSNDPSPVDPMYNSLDENPLSLRVPVDNDALAYAAGAAIGNAVLVCAIGFGLHIVAVFQRTFRNQAKKNNTDGAVVPAVAVLIAMLPSSLFPGSLSTAYGTLVQPGVGASLGLIVSDARTASSIVCGVALLLLWVSLFFYCIFVVVWRGREGGTFLLEPSRAIAVTVARRQPRASTMRRSVTRDNEAHSFLKRLHWMWMEPHTQWIVPQAQRTSSTRRGDQDKTKKQQFLQFLQENVEAVFGGYTAGREWFFVIEWGVGILSGAVLGTAQAIATGEEASGSDTVCAAAEWGNACAIAFTVVQLVAWLALRPFNVRFEFASTVAVGTLSLVSQVLSASDQPTEAASVSTVASIVEIALMLVMMVECVRLRSGQTSREKEVNTQLLLTATAPEVVSRHPRSARPVAPVPETTETAAPFARKMTATHQLKELERLVRLICKENDYVTRFAPLPLPKHTV

SEQ ID NO: 3004 - protein, 427 aa, Bodo saltans
  misc_feature (328)..(427): Xaa can be any naturally occurring amino acid
MPLLQSLLLYNNSLSGTIPSATPFPSLIVLSISSNDFSGTLPRPSTWPLLQMLDAQNNTLLFGPVSLPSSTTLVSPCGTQLCALSTVNHLIYFCLASKILASSYQEFAIQALTSPFSPASCNAPTQASPSSAPSSNVSSMKSVHVSNVAQSAIASAVYTAVMGGAGTLGRGAVPALQRAVASLRLAARCSAATNSANGSASGADDSGNTMFNDLADNPLGVSIPVDAMDLSAAGGAAVMNAVLVVVIGAALHTCTLLQRYARTSWILNAKEKQSTDTVVSKVASAAVSLLPALRLPGSLAVPYGTLLQPSIGACVALMVSSARTPASXXXXXXXXXXXXXXXXXXXXXXXXXXXXXXXXXXXXXXXXXXXXXXXXXXXXXXXXXXXXXXXXXXXXXXXXXXXXXXXXXXXXXXXXXXXXXXXXXXXX

SEQ ID NO: 3005 - protein, 589 aa, Bodo saltans
MSKMTTLVLNANSLVGSLPAEWSNLRAMVGLQLQSNQLSGTLPNEWSSMSNLRMLCVQFNSLIGTLPSSWANMTQISSLLLYSNGLTGALPSSWSSMKELVTSWAFSNSVTGSLPASWSSMSKLTVLYLQGNSLNGTLPSSWSNMSSMMDLELNQNSLVGTLPPSWGNMSKMTTLVLKANSLTGSLPESWGLMSTLQRLATDNNCLHGPVPDAYRAILRVPSGLSTCATRIRSGGGNVTVCSGTPAPRYCDRLTSHSGSSSLSRTISTSITDSASLTQGTTTISTASQLSSSISLGSTRRTWTHSVSATSSTWNCTMIPADLTVSLAPLLSTTAEMLSFESAVMILSALPTWWRGNGLQQATSTVSARPLSRIVMKTSPTLVINLTFTSAALVVDRWVVSNVTLSGQVIPYWTVTSWNTVPWSAIILPAPPGGWIDANTPVLTDATIFLAVTMTCDGSPVLSIGVVVPAPGASLELVSQVTAAGGYSQIASVLAGGASSGSSLGRVMAMRSMVLCDADSAVGGGVIDLGVVLCAAAGAPTGSGSVAARSAIVSNVVLVCVVACVLLAASAAWSRCANVSVRRALCVFCV

SEQ ID NO: 3006 - protein, 1368 aa, Bodo saltans
MSYHRRHHYYLLVSSITALLLVLLLVASTTGDDMCGCLSRVPLLLDFFYSTNGPQWTAKTNWGPLNATNCSALSPWFGVTCSNGDIIEVNLASNGLTGTLPSSFSALTSLTNLDFHGNSLVGSPPSSWSQLSVIQSIFLQDCKLNGTLPDEWGVLSNLRVIQVHVNRLVGTLPSSWGSLGNNMFNLYLSANSFQGTLPTSWGSLTGMQYLMVHTNQLNGTLPSEWGSMTNMKSFRADGNQLSGTLPASYATLAGDLYFSNNRLRGTIPAAWSSMTRVTSVDLSTNCLVGPMPVGKSGIITVCNTKVMGGRIPSGCSGANLWPSVCGSFYTKSDEPTPSTTLSATEDGRTASMTLSASSSFISSLSFSATMSISNAEKTSTESITSSMSATNSLSTTNSDTMLAASLSDSKTMNDTGSTTYNMSLTEEPPRSSSLTFSASLSNTSSPSKSHTISLTLTITTTRPLTKSRALSNTRQSPSLSASATTSSTPSATPSPTSTTSETKDVSVSNTMSVWNDTHTVTATTSPTRTRSVCSNVTGNTPWDAFMPFESVDNTTTASSVTLTDASGGTYMSAAFIIGKAGALRAGRVSLIFILVHELRIESVYFGRVLTQGTAASTVTALNRTAIEVALVPSGSQYLATAATIEIPLHVLAGVCVWGRHTVRVDIVLTATVVGAMQVTQSVALVAGPLSAVSATPASAVAVTRMNILLSLLECEPVNTNQANGNNMLSVLVGPQHGASTRGAVVGNMAIVAAFAGILGSVILVFAMFGRCMYRAPLSASLYEMQNVFHFPGILMMPIAAVCQPTMAACIQLIVLEPVKGDRLFGILGLSVMVLLLMGPFTVAISRQFCLVLVSRSEHENKTAENVTNKDNPQEIISGADPLQQNDGPDPPITEAASAATKRTTSSRSGVANAIAAGKHYAKILFEERATWQPIIATKSSIAWKKRFVPLYMDCGTWWYPLADMWMAASVGAVGGLTIGNSSVCYAQLAVVALSYGATATLQMFVVVPLVLSSKVYSVALQVLGFASCGALVVEFLAPGETPAVTVATWCLLAITVLSTVKSGLDVVMMAIAMPQRMVKATKVIKAIPPLPESSGSPTHPRQTALLNAADASTAKIVVDFDDIDDGKKSDDIGSIDLDAENDFVVLEMRAAAAAAEQQQNSFDFVDLGRANLLVPGGHAPAGEQSDDLARYYNGALTAHHNIVDTDVQLHSRKEVIKSREEEIAFEWDHLLGQFDNSAHEGVAGGCDTAAAAAAAGVPGNNNDDIVCVAHSPLLATTANNDSNKGTEFALNLEESFDDDPLRSIDNQPHRGMSFLTMRDDNDDEIPRDLLLGKHHSTITSTADAPQGFQLDVILGSEEDEDVDILSGS

SEQ ID NO: 3007 - protein, 173 aa, Bodo saltans
MTIFYCAKNSISGTLPMIYSSWLTIDVFDMQYNQLHGSLPSEFAAWRPSLFTLNNNQISSTLPPQYSQWGVSTQYFYLQDCDIYGSLPPSYSNWTYLMGFAIRNSRVSGTLPNSSSRWARMAFDISIQSVPQSNGRVIVLLIQISYVISSVSKFFLFFLSMVGSCYSSFHPLV

SEQ ID NO: 3008 - protein, 66 aa, Bodo saltans
MTAIKNLVLFQNKLNGTLPRSFGNLTNLKTLVLAQNSFSGAVPFDARGSLSNIQMILLQTIHVFLE

SEQ ID NO: 3009 - protein, 607 aa, Bodo saltans
MALCEPMHLVRSGSAWLSFLLPIVPFVVILIGSGASASMCGCQHRFALLMDLYTATNGAGWFKKTGWNSANCTTDWYGVTCSGNLVGTLPTSWWNMTKVKILTLYSNTFSGTLPSEWANMSSLQELYLYFNKITGTLPPSWGNMKQLQRIELQFNTLSGTLPDEWSGMTALRTLSIYRNKLTGTLPSSYSAMTQMENLQLYINTLTGTLPASWSRMTGLLWIFLHQNRLNGTLPSEWSNMLSLQRVWLAFNSLTGPLPATWQARSGMMYISLSGNSLNGTLPASWSTMTILSELYLDSNFFSGSLPSSWSNMRTMAILYLQSNSFTGTLPDSWSSMTQVTNLQLQLNSLSGTLPSSWSSMTNLAIFNPSSNVFTGSLPSSWSNMRALNEFYLQSNSLTGSLPSSWSSMTQVTILQLNSNSFTGTLPDSWSSMTRASMLLGTNCLKGPVPSSYARITRGVNLCNTKVHGSVTNAVLCAGSSWPLYCAGIVSLSATTPQSSTGSTSRTAAPHQFLINRSTSESHSYSRRNVNTSSHLAPSMTLSRKVTKTVLTLSEERGKTQSTTLRAGGRTGYVPISTTTVSLQPPGHIMPSYSRTSCVHSRITAFRI

SEQ ID NO: 3010 - protein, 367 aa, Bodo saltans
MTGFWVYNNQLTGTVPGGYGDWTSMTNFDCSYNSINGTLPDSFGQWMHLEEFKVCTNMLFGTLPAVYSNFVVSFVTVSYNGFSGTLPPEYGASWGPTIRSFYAADNQLRGIIPASYAAWTSLQIFDATKNSLEGTLPLMISAWTQMTALTLGNNRFTGTIPASYAALRGSLVTMYLYCNQLEGGLPDEFRSMSALRSLFLNGNQNLTGSLPSSWGTPTNILRLASFSLQNTSITGSIPPTWSSVILPQGFIALCGTDVCGAGGLTGSYSLCVDDVAACDPRNQSYFIAHSTLYLPPACSSNNNSTPAPSSAATSLAPTPPPSAFSIPANHSKSNAQDWDHCCIGWFSIIGCRQLSSCRRNDEVGDVW

SEQ ID NO: 3011 - protein, 167 aa, Bodo saltans
MTGMLPEGLSIFNATITSIELSWNQLTGTLPASWANLPSISFVSVAHNDLEGTLPDLWSSMGGEIRVLMLGYNHFGGSLPENWSQLTAIQELRLDRNNLRGPLPDSWSTMGGFSLSTLILDSNPLNATLPERWGDMPSVSVLSLANCSKVPDTPPPYIPYLCPDIDA

SEQ ID NO: 3012 - protein, 2046 aa, Bodo saltans
MYPFVIIILLVALCVVEKTNAVACFCDTDLTTNAALLNIRTAAGIAGWNVSLSTCTWTGVGCSATALTTLSLCYTGVACTGGSLPSTSSTWQTIGVALTSLVISGAAITGAFPSAASTSLTKLTTLSFSSYSPTGTMLLPASTVAYSMTLVSSSSITIASSASARLTYLAVTSSTVPDVSGISNLASISINSGTLGTMSWTSMTGLTSVTISYNTGALPSWTGANYPVLQSIALSYQTGAASLPTSWGSIQSLTSMSISYCSGITSTLPASWSSLTMLRTLSVYSTPITGPLPTTWNSLASITSIGVISASFAGATLPSAWTSIPKLTSLTISSSDLGGPLPQWPTSTLLTYLGLQSNSITSPLPTVVNGWSTLTTLDISNNPIGGTLPPWAAMTSLLTFVGSSSSIIGPLPQWGSASSPMGSLQTISISNNVFGGTIPASWAQMPALVSLFAFSSSLIGQLPFTWSSAVLNTLSLSGNSLSGGISLLTFASTTFSALDLSSNRIGSDCTLTVPASLKYLALNDNLCSGTHPNWSSGTSLTFVALGNNSFNGTLANIPSTVLQTLRVDRGNKFTGTLPKLSTSSSLSEISASNNWFTGTLPPFSSSAKPRKLLFAANNLSGTLPYSATVLSMIQYLDISANYFTGAPPSLSTATSLIQLNISSNNFTGSLVLRASLSSLTLLDVSCNSLSGALPSWSSCSNLAYVNLSCGNAFRGTMPILSSSAYDSLTVLDASDQGLTGVLSSILPLTYFGSRFPLTAATSVLLGGNSFTGTIPQFLQWQKLERFNVSGNSLAGTLAFTTTGNPLTSSTFPPNLWSIDISNNALSGTIPVPSAVVLAQVRQFLLGGDVHNFGGTLPTLNTIFPNLTQFSLSGTFPVVIPYTWLVGSAAWVNLTTLSLRKCGFSGTFPHPLASTSLTLLDLSWNRLSGTLPTDLPSFAPQLVTLNVDMNGFSSSLPASWSSLTRLLQLDAHSCLLSGSIPVLPLGLQVVLLWNNSLASSSSQLNWSSYLSLQQLDISSNRLTAVPLFTNTSQLVMLNISDNEISAGLPASWGTFLPSIVALNVSRNSFFGGIPLAWATTGLPFLASLDASSNTLSNLDNSSVSMALLLTLAFPQLQLLWLQGNNYSGTLSTALQDTLSDVDISRNRLTGEVPSELISLAVNLTSLNLCGNLLVGSLPKLWGVTATATLSLLNISSNKLSGALPYNWNTLFKRTTVDLCNNHICGPAPRTLSSIANIGFSRCPGTLVSSDGCYTSSVEPSVSNTKYTPRYRTRSAVHSNSTTQSQETTWTKSLSRTPSMSASASTEQSVSETRVSPNRTVTIMASKSPSQSSTSTHALTKETQSSSYVESPSPSTSVSDVTFSLDVSKSVSPTRNHNTSTISFTPTRSSTMSSKRTTTVSAHVTLSFSKNTKSSSKTPTLSNSTTPTLHTNTLVASTTPTWSHRTPSWSRTPTRVKTPTPTTSTTPSLTLSWSPTQNVSTATLSGSVILVEASVDAFAAAVNDLTATASALTSILSAADISNVNTLMLMSYVDCRGTKSIDSMRDGTFSSYMISPFMDVGWAAVAWGNLALGALALLLNVVVAAVVTVIKDARKSTLVRNDAELTPPPTTFGQALHATVFGDVRVSAAFPPFPAIGLRIVELWTSGSVLGAFAELTAASNASSGTELARYVTGVLVMLSCVSVLVGWQMTLIHKVLPHTTFVEYQLDVLCDHPLAVPRWAPPRWLLPMGSWRPPPVRRRFKQLFVAQVSTWSAKSRIFQNFGLACLSSLLTASTFVNTTSCEVSCALLAVVFFSSALFNARFVLYRCPFDAPLAVSTFALLGVQCSFLAAKEASPTWISLIQTILTIVRAALRLIAGVLEKNMEAHTEFEDDDHNKGNAMAGILFDYYDDDDAGGLPLPEENGEDELEYDPDRVFNPIDMVAASEAAISVDHGGSATGNHHFSVRAASSVLSLGGLRPSRRRGKTDLEIQFKKENSNDDDDNGLDVENLNDFHHDEEDDDSDAPPPPPTPPLSSEDEADTTVDGERIHNSMLERAAEAEHNDEQADC

SEQ ID NO: 3013 - protein, 510 aa, Bodo saltans
MQSALWDVTNTSSNYCSWYGVYCYDSRVTRIDLGYCGLSGTLPAGELCASLLSLESLYLSFNTLQGSLPVALAQCSALEDLELDGNNITGTIPPEFSQLLNMADFDVSFNHIVGTVPATFSAWTQLESFAISNNNISGSLSPSFESWTALRYLYTYNNNMTGTLSPNFGVWRSLIAFKVHSNRFSGTLPSEYASWVLIDVFSVSGNQLIGTLPPQYASWGTSIQYFYVYNNSLSGSLPGDYSKWSSIVEVNANINSFTGTLPAMYSLWSSVTLLYIASTQISGAIPDSWADMQSLFSLQLYLNSLSGTLPNSFAKLGNLVAINVAFNNLSGTLPVAAWAQRQKVQSIIVQDNPYLHGDIPSSWNSLFASRGGYFAMVSICRTQICGAALPALLLGYGCLASNYLPLLANVDYSTLANLAEGTTWTPSIACGAVKHNITIVKTTPSHTEDIRDDDNQPIASSSSSTVTATSTTLIAAGVGIQQLLTPAASAGALHALQGALVMRRLRDAAG

SEQ ID NO: 3014 - protein, 253 aa, Bodo saltans
MTNIKNLYLYNNYISGSLPASWALLPYLVEIQLYQNSLTGTLPKSWNVLPLQYLLLGANYLTGTLPAAWSSLTALTILGLSSNHLIGTVPASWLTVPLLEQLDLLSNCLTGVMPSFIPTSQLLQQPNAINVCSTKIRGAGRNVTTCPGYQWPEYCYALWSHTSSESFRESVSADSSVAITTSPSSSISTSLVRGTLTQTAVHTATGPTLTQWMCSLPAAGTVAVELTPPSSMVVPFDGGGFSLVCCLSGVGDA

SEQ ID NO: 3015 - protein, 572 aa, Bodo saltans
MLPSLDVFLRNALVCSSSSRLPASFPAIAIQLLSYMLLLSLPLGAHTEGMCGCEHRYPILLELYSATNGAAWKNRSGWSSNVGNCSTDWYGVTCNDSDIISIQLAENNLIGTLPASLSALSNLSHLTLTANSLAGYLPASWAALISLQYIELSMNQLTGTIPATWVAMVNISFIDISSNQLNGTLPAEWRSMQQLATLYLHSNGITGTLPGPWGGGMSNMQHLCLDGNSLSGALPSSWSAMTLVEELSLGSNAITGALPPQWSSWTSLEYLSVRFNRITGSLPGSWSSMISLVTMELHSNAIVGSLPREWASLASLRTIGLSDNKLIGSLPSEWANMSTLTTISLRNNLLTGMLPESWSALNNLTSLTLSVNAFTGSLPPSWAALTSLQYIELKLNRLNGELPPEWAAMVSISSIDISSNQLTGTLPAEWRSMQQLATLFLHSNSITGTLPEAWGGGMNNMQLLWLYGNSLSGTLPSSWSAMTLIEELSLGYNTIGGTLPPTWSTMTALRDLFLGSNDIRGSLPTEWSSWTSLEYLSVRFNRITGSLPGSWSAMISLVTMELHSNAIVGSLP

SEQ ID NO: 3016 - protein, 369 aa, Bodo saltans
MARPQQLAQIFQMILTLLSLVVACTAGIDHDDDDLALILKTQRTALTSFFTATNGPQWSDLCTNGWTWDNQTTCEWFGITCTNNLVTSINLANCGLSGTLPSELGQVTSLQDLDVSSNAISGTIPDNGLLNLTNLQLVYLYSNNFSGTLPVGWSTMSSLTDVRLFNNSFTGTLPTSWSMLSYLSTLWLSGNRLSGTLPDAYSALTQLSLFDVGQNGNIVGTLPSSWSSITNLGTVGLQGNQFVGTLPGSWGNLSSLSSLQVDGNHLTGSLPNQWGAQMSNLWQFTASINNLTGTLPESWSQLLFLGSFNVSHNQLSGNLPSTWPAAMNSSMIADALDIRWNCINITIANVTDGYFWANQWIAPQRQGQC

SEQ ID NO: 3017 - protein, 254 aa, Bodo saltans
MSTLMSIYLASSAPCTPGCEARRPLLVELNGATNGRNWHRPWNISATSVCDFGRGITCTNDDIDELYLYDNNLDGTLPESLASLTALQKFGMPYNNLRGTIPKVWKSLAKLNLFDFMSNALVGPLPDDFGAGWPLMNSFSITNNFINGTLPESYAQLPLEIILSKGLCQRCTGVRGKSQFFTFSCIQTDSRERCPKSLACGGRSRCLGARGMVFLERCPHRMPHGVPYKMLAYRIILLLVHYRQNTNLGRDLCS

SEQ ID NO: 3018 - protein, 569 aa, Toxoplasma gondii
MICSIMGGLRSLRAARPYSHQSNTETKHMGLVGVASLLVLVADCTIFASGLSSSTRSRESQTLSASTSGNPFQANVEMKTFMERFNLTHHHQSGIYVDLGQDKEVDGTLYREPAGLCPIWGKHIELQQPDRPPYRNNFLEDVPTEKEYKQSGNPLPGGFNLNFVTPSGQRISPFPMELLEKNSNIKASTDLGRCAEFAFKTVAMDKNNKATKYRYPFVYDSKKRLCHILYVSMQLMEGKKYCSVKGEPPDLTWYCFKPRKSVTENHHLIYGSAYVGENPDAFISKCPNQALRGYRFGVWKKGRCLDYTELTDTVIERVESKAQCWVKTFENDGVASDQPHTYPLTSQASWNDWWPLHQSDQPHSGGVGRNYGFYYVDTTGEGKCALSDQVPDCLVSDSAAVSYTAAGSLSEETPNFIIPSNPSVTPPTPETALQCTADKFPDSFGACDVQACKRQKTSCVGGQIQSTSVDCTADEQNECGSNTALIAGLAVGGVLLLALLGGGCYFAKRLDRNKGVQAAHHEHEFQSDRGARKKRPSDLMQEAEPSFWDEAEENIEQDGETHVMVEGDY

SEQ ID NO: 3019 - protein, 217 aa, Neospora caninum
MARQATFIVALCVCGLAIAGLPRLASAGDLATEQHEGDIGYGVRAYAGVSNYDGDDDAAGNPVDSDVTDDAITDGEWPRVVSGQKPHTTQKGSLIKKLAVPVVGALTSYLVADRVLPELTSAEEEGTESIPGKKRVKTAVGIAALVAAAAFAGLGLARTFRHFVPKKSKTVASEDSALGNSEEQYVEGTVNGSSDPEQERAGGPLIPEGDEQEVDTE

SEQ ID NO: 3020 - protein, 273 aa, Plasmodium falciparum
MGNLMISFLKKDTQSITLEELAKIIKKCKHVVALTGSGTSAESNIPSFRGSSNSIWSKYDPRIYGTIWGFWKYPEKIWEVIRDISSDYEIEINNGHVALSTLESLGYLKSVVTQNVDGLHEASGNTKVISLHGNVFEAVCCTCNKIVKLNKIMLQKTSHFMHQLPPECPCGGIFKPNIILFGEVVSSDLLKEAEEEIAKCDLLLVIGTSSTVSTATNLCHFACKKKKKIVEINISKTYITNKMSDYHVCAKFSELTKVANILKGSSEKNKKIM

SEQ ID NO: 3021 - protein, 485 aa, Plasmodium brasilianum
MKKLSVLAISSFLIVDFLFPGYHHNSNSTKSRNLSELCYNNVDTKLFNELEVRYSTNQDHFYNYNKTIRLLNENNNEKDGNVTNERKKKPTKAVENKLKQPPGDDDDAGNDEGNDAGNDAGNAAGNAAGNAAGNAAGNAAGNAAGNAAGNAAGNAAGNAAGNDAGNAAGNAAGNAAGNAAGNAAGNAAGNAAGNAAGNAAGNAAGNDAGNAAGNAAGNAAGNAAGNAAGNAAGNDAGNAAGNAAGNAAGNAAGNAAGNAAGNAAGNAAGNAAGNAAGNDAGNAAGNAAGNAAGNAAGNAAGNAAGNAAGNAAGNAAGNAAGNAAGNAAGNAAGNAAGNAAGNAAGNAAGNAAGNAAGNAAGNAAGNAAGNEKAKNKDNKVDANTNKKDNQEENNDSSNGPSEEHIKNYLESIRNSITEEWSPCSVTCGSGIRARRKVDAKNKKPAELVLSDLETEICSLDKCSSIFNVVSNSLGIVLVLVLILFH

SEQ ID NO: 3022 - protein, 752 aa, Trypanosoma cruzi
MSRRVFASAVLLLIVVTMCCGGAATAQVGSNADASTPGSALTGAIAGEGSSSGGVEGLQRVDLFVPQKTQVLPKKGPDSSRRDSFFSPSLVSAGGVIAAFAEGHINTKNPHNESAKPFSDVVAGYIDSAWEWPTLVEKVSESTWQAHTVLGKAEGKKSLDVVLRPTTTTKGNKVFLLAGSTDLSYVNWSWREGSLELKLVVGDVTKPTSSEPTERIKWGEIKSLLNESTIAAQKGKLTEFLASGGSGVVMEDGTIVFSLMAVNEKKDGVFSLIIYSKDNGSTWSLSEGISPAKCGAPRITEWEGSLLMIVDCENDQRVYVSRDMGTTWTEAIGTLSGVGSTHNWETIGRRLAVEALITVTIEGRKVMLYTQRGYALGETETTSPLYLWVTDNNRSFFVGPVGMDNAVKGELAGALLYSDGGLHLLQRRDSGEDSVMSLSRLTEELKEIKSVLSTWSQKDVFFSSLSIPTVGLVAVLSDAAGDGRWYDEYLCLNATVTNATKVKDGFQLTEPDSRAVWSVNIPDGNVRHISLSHNFTLVASVIIEEAPSGNTPLLTAVLVDAGPEYFMRLSYTADNKWMTMLKDEKKPTTESRPWEAGKEHQVALMLQGNKASVYVDGELLGEEEVPLTGEKPLEIFAFCFGACKIDGDEEESSPKEIGKKPRVTVTNVFLYNRPLNSTEMRAIKDRIPVPTRAPEPQVKIAPKPAAPAAPAGNEETARETGDGGANGDAVSAYGRVLLPLLFLLGLWGLATA

SEQ ID NO: 3023 - protein, 893 aa, Theileria annulata
MKFLVLLFNILCLFPILGADELVMSPIPTTDVQPKVTFDINSEVSSGPLYLNPVEMAGVKYLQLQRQPGVQVHKVVEGDIVIWENEEMPLYTCAIVTQNEVPYMAYVELLEDPDLIFFLKEGDQWAPIPEDQYLARLQQLRQQIHTESFFSLNLSFQHENYKYEMVSSFQHSIKMVVFTPKNGHICKMVYDKNIRIFKALYNEYVTSVIGFFRGLKLLLLNIFVIDDRGMIGNKYFQLLDDKYAPISVQGYVATIPKLKDFAEPYHPIILDISDIDYVNFYLGDATYHDPGFKIVPKTPQCITKVVDGNEVIYESSNPSVECVYKVTYYDKKNESMLRLDLNHSPPSYTSYYAKREGVWVTSTYIDLEEKIEELQDHRSTELDVMFMSDKDLNVVPLTNGNLEYFMVTPKPHRDIIIVFDGSEVLWYYEGLENHLVCTWIYVTEGAPRLVHLRVKDRIPQNTDIYMVKFGEYWVRISKTQYTQEIKKLIKKSKKKLPSIEEEDSDKHGGPPKGPEPPTGPGHSSSESKEHEDSKESKEPKEHGSPKETKEGEVTKKPGPAKEHKPSKIPVYTKRPEFPKKSKSPKRPESPKSPKRPVSPQRPVSPKSPKRPESLDIPKSPKRPESPKSPKRPVSPQRPVSPRRPESPKSPKSPKSPKSPKVPFDPKFKEKLYDSYLDKAAKTKETVTLPPVLPTDESFTHTPIGEPTAEQPDDIEPIEESVFIKETGILTEEVKTEDIHSETGEPEEPKRPDSPTKHSPKPTGTHPSMPKKRRRSDGLALSTTDLESEAGRILRDPTGKIVTMKRSKSFDDLTTVREKEHMGAEIRKIVVDDDGTEADDEDTHPSKEKHLSTVRRRRPRPKKSSKSSKPRKPDSAFVPSIIFIFLVSLIVGIL

SEQ ID NO: 3024 - protein, 1162 aa, Trypanosoma cruzi
MVAIADARYETSSENSLIDTVAKYSVDDGETWETQIAIKNSRVSSVSRVVDPTVIVKGNKLYVLVGSYYSSRSYWSSHGDARDWDILLAVGEVTKSTAGGKITASIKWGSPVSLKKFFPAEMEGMHTNQFLGGAGVAIVASNGNLVYPVQVTNKRKQVFSKIFYSEDDGKTWKFGKGRSDFGCSEPVALEWEGKLIINTRVDWKRRLVYESSDMEKPWVEAVGTVSRVWGPSPKSNQPGSQTSFTAVTIEGMRVMLFTHPLNFKGRCVRDRLNLWLTDNQRIYNVGQVSIGDENSAYSSVLYKDDKLYCLHEINTDEVYSLVFARLVGELRIIKSVLRSWKNWTATCPAFAPLLIQPLRRQRVVVVPLSPRLVLLAFCRQRLPKRMGGSYRCVNASTANAERVRNGLKFAGVGGGALWPVSQQGQNQRYRFANHAFTLVASVTIHEAPRAASPLLGASLDSSGGKKLLGLSYDEKHQWQPIYGSTPVTPTGSWETGKRYHLVLTMANKIGSVYIDGELLEGSGQTVVPDGRTPDISHFYVGGYKRSDMPTISHVTVNNVLLYNRRQLNTEEIRTLFLSQDLIGTEAHMDSSSDSSAHSTPSTPADSSAHSTPSTPVDSSAHSTPSTPADSSAHGTPSTPVDSSAHGTPSTPADSSAHGTPSTPVDSSAHSTPSTPVDSSAHSTPSTPVDSSAHGAPSTPADSSAHGTPSTPVDSSAHGTPSTPADSSAHSTPSTPADSSAHSTPSTPADSSAHSTPSTPVDSSAHGTPSTPADSSAHSTPSTPADSSAHGTPSTPVDSSAHSTPSTPVDSSAHGTPSTPVDSSAHSTPSTPVDSSAHGTPSTPVDSSAHSTPSTPADSSAHSTPSTPADSSAHGTPSTPVDSSAHSTPSTPADSSAHSTPSTPVDSSAHSTPSTPADSSAHGTPSTPVDSSAHGTPSTPADSSAHSTPSTPADSSAHSTPSTPADSSAHSTPSTPVDSSAHSTPSTPADSSAHSTPSTPADSSAHSTPSTPADSSAHSTPSTPVDSSAHSTPSTPADSSAHGTPSTPADSSAHSTPSTPVDSSAHSTPSTPADSSAHGTPSTPADSSAHSTPSTPADSSAHGTPSTPADSSAHSTPSTPAGSSANGTVLILPDGAALSTFSGGGLLLCACALLLHVFFMAVF

SEQ ID NO: 3025 - protein, 343 aa, Plasmodium vivax
NGVNFNNVDASSLGAAHVGQSASRGRGLGENPDDEEGDAKKKKDGKKAEPKNPRENKLKQPGDRADGQPAGDRADGQPAGDRADGQPAGDRADGQPAGDRAAGQPAGDRADGQPAGDRADGQPAGDRADGQPAGDRADGQPAGDRAAGQPAGDRAAGQPAGDRADGQPAGDRAAGQPAGDRADGQPAGDRAAGQPAGDRADGQPAGDRAAGQPAGDRAAGQPAGDRAAGQAAGDRAAGQAAGGNAGGQGQNNEGANAPNEKSVKEYLDKVRATVGTEWTPCSVTCGVGVRVRRRVNAANKKPEDLTLNDLETDVCTMDKCAGIFNVVSNSLGLVILLVLALFN

SEQ ID NO: 3026 - protein, 272 aa, Plasmodium falciparum
MKVIKTLSIINFFIFVTFNIKNESKYSNTFINNAYNMSIRRSMAESKPSTGAGGSAGGSAGGSAGGSAGGSAGGSAGSGDGNGADAEGSSSTPATTTTTKTTTTTTTTNDAEASTSTSSENPNHKNAETNPKGKGEVQEPNQANKETQNNSNVQQDSQTKSNVPPTQDADTKSPTAQPEQAENSAPTAEQTESPELQSAPENKGTGQHGHMHGSRNNHPQNTSDSQKECTDGNKENCGAATSLLNNSSNIASINKFVVLISATLVLSFAIFI

SEQ ID NO: 3027 - protein, 1726 aa, Plasmodium falciparum
MKIIFFLCSFLFFIINTQCVTHESYQELVKKLEALEDAVLTGYGLFHKEKMILNEEEITTKGASAQSGTSGTSGTSGTSGTSGTSGTSAQSGTSGTSAQSGTSGTSAQSGTSGTSGTSGTSPSSRSNTLPRSNTSSGASPPADASDSDAKSYADLKHRVRNYLFTIKELKYPELFDLTNHMLTLCDNIHGFKYLIDGYEEINELLYKLNFYFDLLRAKLNDVCANDYCQIPFNLKIRANELDVLKKLVFGYRKPLDNIKDNVGKMEDYIKKNKTTIANINELIEGSKKTIDQNKNADNEEGKKKLYQAQYDLSIYNKQLEEAHNLISVLEKRIDTLKKNENIKELLDKINEIKNPPPANSGNTPNTLLDKNKKIEEHEEKIKEIAKTIKFNIDSLFTDPLELEYYLREKNKKVDVTPKSQDPTKSVQIPKVPYPNGIVYPLPLTDIHNSLAADNDKNSYGDLMNPDTKEKINEKIITDNKERKIFINNIKKQIDLEEKKINHTKEQNKKLLEDYEKSKKDYEELLEKFYEMKFNNNFDKDVVDKIFSARYTYNVEKQRYNNKFSSSNNSVYNVQKLKKALSYLEDYSLRKGISEKDFNHYYTLKTGLEADIKKLTEEIKSSENKILEKNFKGLTHSANASLEVYDIVKLQVQKVLLIKKIEDLRKIELFLKNAQLKDSIHVPNIYKPQNKPEPYYLIVLKKEVDKLKEFIPKVKDMLKKEQAVLSSITQPLVAASETTEDGGHSTHTLSQSGETEVTEETEETEETVGHTTTVTITLPPKEVKVVENSIEHKSNDNSQALTKTVYLKKLDEFLTKSYICHKYILVSNSSMDQKLLEVYNLTPEEENELKSCDPLDLLFNIQNNIPAMYSLYDSMNNDLQHLFFELYQKEMIYYLHKLKEENHIKKLLEEQKQITGTSSTSSPGNTTVNTAQSATHSNSQNQQSNASSTNTQNGVAVSSGPAVVEESHDPLTVLSISNDLKGIVSLLNLGNKTKVPNPLTISTTEMEKFYENILKNNDTYFNDDIKQFVKSNSKVITGLTETQKNALNDEIKKLKDTLQLSFDLYNKYKLKLDRLFNKKKELGQDKMQIKKLTLLKEQLESKLNSLNNPHNVLQNFSVFFNKKKEAEIAETENTLENTKILLKHYKGLVKYYNGESSPLKTLSEVSIQTEDNYANLEKFRVLSKIDGKLNDNLHLGKKKLSFLSSGLHHLITELKEVIKNKNYTGNSPSENNKKVNEALKSYENFLPEAKVTTVVTPPQPDVTPSPLSVRVSGSSGSTKEETQIPTSGSLLTELQQVVQLQNYDEEDDSLVVLPIFGESEDNDEYLDQVVTGEAISVTMDNILSGFENEYDVIYLKPLAGVYRSLKKQIEKNIFTFNLNLNDILNSRLKKRKYFLDVLESDLMQFKHISSNEYIIEDSFKLLNSEQKNTLLKSYKYIKESVENDIKFAQEGISYYEKVLAKYKDDLESIKKVIKEEKEKFPSSPPTTPPSPAKTDEQKKESKFLPFLTNIETLYNNLVNKIDDYLINLKAKINDCNVEKDEAHVKITKLSDLKAIDDKIDLFKNHNDFEAIKKLINDDTKKDMLGKLLSTGLVQNFPNTIISKLIEGKFQDMLNISQHQCVKKQCPENSGCFRHLDEREECKCLLNYKQEGDKCVENPNPTCNENNGGCDADAKCTEEDSGSNGKKITCECTKPDSYPLFDGIFCSSSNFLGISFLLILMLILYSFI

SEQ ID NO: 3028 - protein, 1772 aa, Plasmodium yoelii yoelii
MKVIGLLFSFVFFAIKCKSETIEVYNDLIQKLEKLESLSVDGLELFQKSQVIINATQPTETIDPFTNHNFAQQVQDFVTKFEGLGFTEQTELVNLIKALTPNRYGVKYLIESKEEFNGLMHAINFYYDVLRDKLNDMCANNYCEIPEHLKISEEETEMLKKVILGYRKPIENIQDDIEKLEIYIERNKETVAALNALIAEETKKIQPEGNEDCNDASCDSDKYNKKKPIYQAMYNVIFYKKQLAEIQKVVEVLEKRVSTLKKNDAIKPLWQQIEVLNAAPVVTAETQIVTGGQSSTEPGSGGSSASGTSSSGQASAGTGVEQANTVASVTVTPSVGQNGEASTNPQTAQVQPVPTLTLEEKQKKIAGLYAQIKEIAKTIKFNLEGIFVDPIELEYFKKEKKKESCNLSTSSCKKNKASETIIPLTIRYPNGISYPLPENDVYNKIANNAAETTYGDLTHPDNTPLTGDLATNEQARKDLIKAIKKKIKAEEKKLETLKTNYDNKLTEFNQQKTPFKEAAKEFYESKFRNKLTSEIFEKFKTKRDEYMTKKTELNTCEYGNTKELINKLNKQLNYLQDYSLRKDIISNEIEYFSNKKKELQYNINRLAEAVQAKQNVLVASKDVPLSTLVELQIQKSLLTKQIEQLNKTEVSLNKAQLKDKLYVPKTYGNEGKPEPYYLIAVKKEVDRLAQFIPKIESMIAKEKERMEQGPAITGESEEVPSGPSAESSTDRSTQSSTSSSSSSSSTPAAAESSSATLPEAPAPAEAASPSTEASEETTIPPTTQETQPSQAASSTTPAKPVMTKLYYLEKLQKFLVFSYSCHKYVLLQNSTINKDALSKYALTSEEDKIRTLKRCSELDVLLAIQNNMPTMYSLYESIVDGLQNIYTELYEKEMMYHIYKLKDENPSIKSLLVKAGVIEPEPVAAPTPVTPAATEQQQQQATPDVQSDAPAPSDVSQQPETPVTSTTPEVTTSTEASSSAPGEGTPSGEAGASGTEGATASNAATPAGTSASGSAASNASTTSDVTPPAAAAAVPSTSTPAPAQPPAANSQSGNPDSGIRSRAESEEDMPADDFELDNLYKSYLQQIDGNNTEFINFIKSKKELIKALTPEKVNQLYLEIAHLKELSEHYYDRYSTYKLKLERLYNKHEQIQLTNRQIRDLSILKARLLKRKQTLNGVFYILNGYVNFFNKRREAEKQYVDNALKNTDMLLKYYKARTKYFTSEAVPLKTLSKASLDRESNYLKIEKFRAYSRLELRLKKNINLGKERISYVSGGLHHVFEEFKELIKDKDYTGKKNPDNAPEVTNAFEQYKELLPKGVTVSTPAVAVTTTLAADAPATPEGAVPGAVPGAVPGAVPGAVPGAVPGSGTDTRVAGSSVDDNEDDDIYQIASGQSEDAPEKDILSEFTNESLYVYTKRLGSTYKSLKKHMLREFSTIKEDMTNGLNNKSQKRNDFLEVLSHELDLFKDLSTNKYVIRNPYQLLDNDKKDKQIVNLKYATKGINEDIETTTDGIKFFNKMVELYNTQLAAVKEQIATIEAETNDTNKEEKKKYIPILEDLKGLYETVIGQAEEYSEELQNRLDNYKNEKAEFEILTKNLEKYIQIDEKLDEFVEHAENNKHIASIALNNLNKSGLVGEGESKKILAKMLNMDGMDLLGVDPKHVCVDTRDIPKNAGCFRDDNGTEEWRCLLGYKKGEGNTCVENNNPTCDINNGGCDPTASCQNAESTENSKKIICTCKEPTPNAYYEGVFCSSSSFMGLSILLIITLIVFNIF

SEQ ID NO: 3029 - protein, 424 aa, Plasmodium falciparum
MMRKLAILSVSSFLFVEALFQEYQCYGSSSNTRVLNELNYDNAGTNLYNELEMNYYGKQENWYSLKKNSRSLGENDDGNNNNGDNNREGKDEDKRDGNNEDNETLRKPKHKKLKQPGDGNPDPNANPNVDPNANPNVDPNANPNVDPNANPNANPNANPNANPNANPNANPNANPNANPNANPNANPNANPNANPNANPNANPNANPNANPNANPNANPNANPNANPNANPNANPNANPNANPNANPNANPNANPNANPNANPNANPNANPNANPNANPNANPNANPNANPNANPNANPNKNNQGNGQGHNMPNDPNRNVDENANANNAVKNNNNEEPSDKHIEQYLKKIQNSLSTEWSPCSVTCGNGIQVRIKPGSANKPKDELDYENDIEKKICKMEKCSSVFNVVNSSIGLIMVLSFLFLN

SEQ ID NO: 3030 - protein, 622 aa, Plasmodium falciparum
MRKLYCVLLLSAFEFTYMINFGRGQNYWEHPYQKSGVYHPINEHREHPKEYEYPLHQEHTYQQEDSGEDENTLQHAYPIDHEGAEPAPQEQNLFSSIEIVERSNYMGNPWTEYMAKYDIEEVHGSGIRVDLGEDAEVAGTQYRLPSGKCPVFGKGIIIENSNTTFLKPVATGNQDLKDGGFAFPPTNPLISPMTLNGMRDFYKNNEYVKNLDELTLCSRHAGNMNPDNDKNSNYKYPAVYDYNDKKCHILYIAAQENNGPRYCNKDQSKRNSMFCFRPAKDKLFENYTYLSKNVVDNWEEVCPRKNLENAKFGLWVDGNCEDIPHVNEFSANDLFECNKLVFELSASDQPKQYEQHLTDYEKIKEGFKNKNASMIKSAFLPTGAFKADRYKSHGKGYNWGNYNRETQKCEIFNVKPTCLINNSSYIATTALSHPIEVEHNFPCSLYKDEIKKEIERESKRIKLNDNDDEGNKKIIAPRIFISDDKDSLKCPCDPEMVSNSTCRFFVCKCVERRAEVTSNNEVVVKEEYKDEYADIPEHKPTYDNMKIIIASSAAVAVLATILMVYLYKRKGNAEKYDKMDQPQHYGKSTSRNDEMLDPEASFWGEEKRASHTTPVLMEKPYY

SEQ ID NO: 3031 - protein, 397 aa, Plasmodium falciparum
MMRKLAILSVSSFLFVEALFQEYQCYGSSSNTRVLNELNYDNAGTNLYNELEMNYYGKQENWYSLKKNSRSLGENDDGNNEDNEKLRKPKHKKLKQPADGNPDPNANPNVDPNANPNVDPNANPNVDPNANPNANPNANPNANPNANPNANPNANPNANPNANPNANPNANPNANPNANPNANPNANPNANPNANPNVDPNANPNANPNANPNANPNANPNANPNANPNANPNANPNANPNANPNANPNANPNANPNANPNANPNANPNANPNKNNQGNGQGHNMPNDPNRNVDENANANSAVKNNNNEEPSDKHIKEYLNKIQNSLSTEWSPCSVTCGNGIQVRIKPGSANKPKDELDYANDIEKKICKMEKCSSVFNVVNSSIGLIMVLSFLFLN

SEQ ID NO: 3032 - protein, 476 aa, Trypanosoma brucei rhodesiense
MPTAGAVLLLATAAVLSRPAAAANEKKPLTISAAGAVCGFSNELKEVASFAATKVNAYLTETEQLGTLAVDFCAAIFNGNGKPTAGEVYAALLAAKTQTDRQAQQQKLVTGALLASSLCSQQAGHIESFIHVFYQAHRDATTTCIYKSDEHQRKAADVPCVNNGGGLNKITITTRATKPQLNSKYKAIVAGTTPNGAAAEKNCKLVNGEQSQNVFLASQTTNIALKWGDGLLTVPIGDTAISASNWEPNNKDSIASGNYKECAAALEQVPPRQSTATAAASKLLKLEAEDDPKLEEELISKNSFYGDFPISNVKITATDFSSLHSKLKSYRKKHTADGHQLLKAKLQHLEKQMQMNATACKLGAEISSGEPSTAKTTTSGRCEGKAKTACPKSDYRQREEKDGKEECKPKSGEEQKTQTTGAGEGAADKKEEKCKGKLEPECTKAPECKWEGETCKDSSILVNKQFTLSMISAAFM

SEQ ID NO: 3033 - protein, 191 aa, Babesia bovis
MEAQSATETQKNLKTLMELIKTKRPFKSSDFDTLNLDYLSGQSNEELFKLLIDAINGMKENVAKVNEYLTEEGDHSLSGDELLKFVYKELVYDDESEFDKEKLQKLYKTFSEDSNAFATLQSYIQYLQPEENSQRWIQVHEPVKHRRRLNHNPALQEISMDSRVQPSQLDLHSPFRDCLSLLSATSFLSAF

SEQ ID NO: 3034 - protein, 211 aa, Schistosoma mansoni
MAGEHIKVIYFDGRGRAESIRMTLVAAGVDYEDERISFQDWPKIKPTIPGGRLPAVKVTDDHGHVKWMLESLAIARYMAKKHHMMGETDEEYYSVEKLIGQAEDVEHEYHKTLMKPQEEKEKITKEILNGKVPVLLNMICESLKGSTGKLAVGDKVTLADLVLIAVIDHVTDLDKGFLTGKYPEIHKHRENLLASSPRLAKYLSNRPATPF

SEQ ID NO: 3035 - protein, 441 aa, Plasmodium chabaudi
MKAISLGLISSIIFSIVLAKNSSGSGSSTGCFGCFRKKPKKKILATEVAKPVKAPETADFDPKLPNLKFIEEFEPITIEGCKSRLHELDEPFVSETDGMIIDKVTGFSRRENDSVLSGWYIRPYEEGYENMIKVNFIPLREYYKRMENRPPKQYDGPPPIPDMPQGYVPPKKEEIPVEQYVIQLSEEDPYLLQEEDALSLMEYDAETLNEGDAETLNEGDAETLNEYDAGTLNEEDAGTTNEAGEGTTNEEGEGAANEYDAETLNEYDADTLNEYDAGTLNEYDAGTLNEEEGSTTNEAGEGTSNEAGEGTANDDEELDEEVASIFDDDEHADDLSLLDYDENSNENQENVKKGNENEGEQKGNENEGEQKGKKKKAKEKSKKKVKNKPTMTTKKKKKKEKKKKKKEKEKKKEKKVKVEVIMDHFSEMEKMMNNKIKHWNK

SEQ ID NO: 3036 - protein, 240 aa, Trypanosoma cruzi
EHSGDNVRHVFLNHNFTLVASVTIEEAPSEKTPLLTALLGDAEPPYFMRLSYTADNKWETISKGDKKLTTESRPWVPKKEHQVALMLQGNKASVYIDGESLGEEAPLTVETPLEPFGFCFGACDFDDDDDGGDDDDEEDSQEESSPKESSPEKIGKKPHVTVTNVFLYNRPLNPTEMRAIKDRIPVSTRAPEPQVKIAPKPVAPAAPGSLRCLAHGKYQQHRGGQLWGEPPIPNMRQRDA

SEQ ID NO: 3037 - protein, 367 aa, Plasmodium yoelii yoelii
MKKCTILVVASLLLVDSLLPGYGQNKSVQAQRNLNELCYNEENDNKLYHVLNSKNGKIYNRNIVNRLLGDALNGKPEEKKDDPPKDGNKDDLPKEEKKDDLPKEEKKDDPPKDPKKDDPPKEAQNKLNQPVVADENVDQGPGAPQGPGAPQGPGAPQGPGAPQGPGAPQGPGAPQGPGAPQGPGAPQGPGAPQGPGAPQGPGAPQGPGAPQGPGAPQGPGAPQGPGAPQEPPQQPPQQPPQQPPQQPPQQPPQQPPQQPRPQPDGNNNNNNNNGNNNEDSYVPSAEQILEFVKQISSQLTEEWSQCSVTCGSGVRVRKRKNVNKQPENLTLEDIDTEICKMDKCSSIFNIVSNSLGFVILLVLVFFN

SEQ ID NO: 3038 - protein, 255 aa, Eimeria tenella
LRLLLKLLLLLLGQQKHWPERQQQQQPQPWLDRQQQQQQHNQQLQKQQWPEGQRQQLWPEQQQQQWPEQHQQAQQQQQWPQQQPQMQQEQWPQQQPQVQQQQQWPQQQHRRQHGQQQQCMNSQQQLQQCGQQQQQQLQQQWSEQQQQQQQQQWPEQPEQQQQQQWPEQQQQQWSDQNQQQQAQQWQAQQQQQWPQQQQQPQQQQQQQQQQDLGPDGVGIVVPYLGSSPADFEVQNLGVSVLPRIKLPLPKFDNDD

SEQ ID NO: 3039 - protein, 1701 aa, Plasmodium falciparum
MKIIFFLCSFLFFIINTQCVTHESYQELVKKLEALEDAVLTGYSLFQKEKMVLNEGTSGTAVTTSTPGSSGSVTSGGSVASVASVASGGSGGSVASGGSGNSRRTNPSDNSSDSNTKTYADLKHRVQNYLFTIKELKYPELFDLTNHMLTLSKNVDGFKYLIDGYEEINELLYKLNFYYDLLRAKLNDACANSYCQIPFNLKIRANELDVLKKIVFGYRKPLDNIKDNVGKMEDYIKKNKTTIANINELIEGSKKTIDQNKNADNEEGKKKLYQAQYNLFIYNKQLQEAHNLISVLEKRIDTLKKNENIKKLLEDIDKIKTDAENPTTGSKPNPLPENKKKEVEGHEEKIKEIAKTIKFNIDSLFTDPLELEYYLREKNKKVDVTPKSQDPTKSVQIPKVPYPNGIVYPLPLTDIHNSLAADNDKNSYGDLMNPDTKEKINEKIITDNKERKIFINNIKKQIDLEEKNINHTKEQNKKLLEDYEKSKKDYEELLEKFYEMKFNNNFDKDVVDKIFSARYTYNVEKQRYNNKFSSSNNSVYNVQKLKKALSYLEDYSLRKGISEKDFNHYYTLKTGLEADIKKLTEEIKSSENKILEKNFKGLTHSANASLEVSDIVKLQVQKVLLIKKIEDLRKIELFLKNAQLKDSIHVPNIYKPQNKPEPYYLIVLKKEVDKLKEFIPKVKDMLKKEQAVLSSITQPLVAASETTEDGGHSTHTLSQSGETEVTEETEVTEETVGHTTTVTITLPPKEESAPKEVKVVENSIEHKSNDNSQALTKTVYLKKLDEFLTKSYICHKYILVSNSSMDQKLLEVYNLTPEEENELKSCDPLDLLFNIQNNIPAMYSLYDSMNNDLQHLFFELYQKEMIYYLHKLKEENHIKKLLEEQKQITGTSSTSSPGNTTVNTAQSATHSNSQNQQSNASSTNTQNGVAVSSGPAVVEESHDPLTVLSISNDLKGIVSLLNLGNKTKVPNPLTISTTEMEKFYENILKNNDTYFNDDIKQFVKSNSKVITGLTETQKNALNDEIKKLKDTLQLSFDLYNKYKLKLDRLFNKKKELGQDKMQIKKLTLLKEQLESKLNSLNNPHNVLQNFSVFFNKKKEAEIAETENTLENTKILLKHYKGLVKYYNGESSPLKTLSEVSIQTEDNYANLEKFRALSKIDGKLNDNLHLGKKKLSFLSSGLHHLITELKEVIKNKNYTGNSPSENNKKVNEALKSYENFLPEAKVTTVVTPPQPDVTPSPLSVRVSGSSGSTKEETQIPTSGSLLTELQQVVQLQNYDEEDDSLVVLPIFGESEDNDEYLDQVVTGEAISVTMDNILSGFENEYDVIYLKPLAGVYRSLKKQIEKNIITFNLNLNDILNSRLKKRKYFLDVLESDLMQFKHISSNEYIIEDSFKLLNSEQKNTLLKSYKYIKESVENDIKFAQEGISYYEKVLAKYKDDLESIKKVIKEEKEKFPSSPPTTPPSPAKTDEQKKESKFLPFLTNIETLYNNLVNKIDDYLINLKAKINDCNVEKDEAHVKITKLSDLKAIDDKIDLFKNTNDFEAIKKLINDDTKKDMLGKLLSTGLVQNFPNTIISKLIEGKFQDMLNISQHQCVKKQCPENSGCFRHLDEREECKCLLNYKQEGDKCVENPNPTCNENNGGCDADATCTEEDSGSSRKKITCECTKPDSYPLFDGIFCSSSNFLGISFLLILMLILYSFI

SEQ ID NO: 3040 - protein, 3135 aa, Plasmodium falciparum
MKKIITLKNLFLIILVYIFSEKKDLRCNVIKGNNIKDDEDKRFHLFYYSHNLFKTPETKEKKNKKECFYKNGGIYNLSKEIRMRKDTSVKIKQRTCPFHKEGSSFEMGSKNITCFYPIVGKKERKTLDTIIIKKNVTNDHVVSSDMHSNVQEKNMILIRNIDKENKNDIQNVEEKIQRDTYENKDYESDDTLIEWFDDNTNEENFLLTFLKRCLMKIFSSPKRKKTVVQKKHKSNFFINSSLKYIYMYLTPSDSFNLVRRNRNLDEEDMSPRDNFVIDDEEEEEEEEEEEEEEEEEEEEEEEEEYDDYVYEESGDETEEQLQEEHQEEVGAESSEESFNDEDEDSVEARDGDMIRVDEYYEDQDGDTYDSTIKNEDVDEEVGEEVGEEVGEEVGEEVGEEVGEEVGEEVGEEVGEEEGEEVGEGVGEEVGEEEGEEVGEEEGEYVDEKERQGEIYPFGDEEEKDEGGESFTYEKSEVDKTDLFKFIEGGEGDDVYKVDGSKVLLDDDTISRVSKKHTARDGEYGEYGEAVEDGENVIKIIRSVLQSGALPSVGVDELDKIDLSYETTESGDTAVSEDSYDKYASNNTNKEYVCDFTDQLKPTESGPKVKKCEVKVNEPLIKVKIICPLKGSVEKLYDNIEYVPKKSPYVVLTKEETKLKEKLLSKLIYGLLISPTVNEKENNFKEGVIEFTLPPVVHKATVFYFICDNSKTEDDNKKGNRGIVEVYVEPYGNKINGCAFLDEDEEEEKYGNQIEEDEHNEKIKMKTFFTQNIYKKNNIYPCYMKLYSGDIGGILFPKNIKSTTCFEEMIPYNKEIKWNKENKSLGNLVNNSVVYNKEMNAKYFNVQYVHIPTSYKDTLNLFCSIILKEEESNLISTSYLVYVSINEELNFSLFDFYESFVPIKKTIQVAQKNVNNKEHDYTCDFTDKLDKTVPSTANGKKLFICRKHLKEFDTFTLKCNVNKTQYPNIEIFPKTLKDKKEVLKLDLDIQYQMFSKFFKFNTQNAKYLNLYPYYLIFPFNHIGKKELKNNPTYKNHKDVKYFEQSSVLSPLSSADSLGKLLNFLDTQETVCLTEKIRYLNLSINELGSDNNTFSVTFQVPPYIDIKEPFYFMFGCNNNKGEGNIGIVELLISKQEEKIKGCNFHESKLDYFNENISSDTHECTLHAYENDIIGFNCLETTHPNEVEVEVEDAEIYLQPENCFNNVYKGLNSVDITTILKNAQTYNINNKKTPTFLKIPPYNLLEDVEISCQCTIKQVVKKIKVIITKNDTVLLKREVQSESTLDDKIYKCEHENFINPRVNKTFDENVEYTCNIKIENFFNYIQIFCPAKDLGIYKNIQMYYDIVKPTRVPQFKKFNNEELHKLIPNSEMLHKTKEMLILYNEEKVDLLHFYVFLPIYIKDIYEFNIVCDNSKTMWKNQLGGKVIYHITVSKREQKVKGCSFDNEHAHMFSYNKTNVKNCIIDAKPKDLIGFVCPSGTLKLTNCFKDAIVHTNLTNINGILYLKNNLANFTYKHQFNYMEIPALMDNDISFKCICVDLKKKKYNVKSPLGPKVLRALYKKLNIKFDNYVTGTDQNKYLMTYMDLHLSHKRNYLKELFHDLGKKKPADTDANPESIIESLSINESNESGPFPTGDVDAEHLILEGYDTWESLYDEQLEEVIYNDIESLELKDIEQYVLQVNLKAPKLMMSAQIHNNRHVCDFSKNNLIVPESLKKKEELGGNPVNIHCYALLKPLDTLYVKCPTSKDNYEAAKVNISENDNEYELQVISLIEKRFHNFETLESKKPGNGDVVVHNGVVDTGPVLDNSTFEKYFKNIKIKPDKFFEKVINEYDDTEEEKDLESILPGAIVSPMKVLKKKDPFTSYAAFVVPPIVPKDLHFKVECNNTEYKDENQYISGYNGIIHIDISNSNRKINGCDFSTNNSSILTSSVKLVNGETKNCEININNNEVFGIICDNETNLDPEKCFHEIYSKDNKTVKKFREVIPNIDIFSLHNSNKKKVAYAKVPLDYINKLLFSCSCKTSHTNTIGTMKVTLNKDEKEEEDFKTAQGIKHNNVHLCNFFDNPELTFDNNKIVLCKIDAELFSEVIIQLPIFGTKNVEEGVQNEEYKKFSLKPSLVFDDNNNDIKVIGKEKNEVSISLALKGVYGNRIFTFDKNGKKGEGISFFIPPIKQDTDLKFIINETIDNSNIKQRGLIYIFVRKNVSENSFKLCDFTTGSTSLMELNSQVKEKKCTVKIKKGDIFGLKCPKGFAIFPQACFSNVLLEYYKSDYEDSEHINYYIHKDKKYNLKPKDVIELMDENFRELQNIQQYTGISNITDVLHFKNFNLGNLPLNFKNHYSTAYAKVPDTFNSIINFSCNCYNPEKHVYGTMQVESDNRNFDNIKKNENVIKNFLLPNIEKYALLLDDEERQKKIKQQQEEEQQEQILKDQDDRLSRHDDYNKNHTYILYDSNEHICDYEKNESLISTLPNDTKKIQKSICKINAKALDVVTIKCPHTKNFTPKDYFPNSSLITNDKKIVITFDKKNFVTYIDPTKKTFSLKDIYIQSFYGVSLDHLNQIKKIHEEWDDVHLFYPPHNVLHNVVLNNHIVNLSSALEGVLFMKSKVTGDETATKKNTTLPTDGVSSILIPPYVKEDITFHLFCGKSTTKKPNKKNTSLALIHIHISSNRNIIHGCDFLYLENQTNDAISNNNNNSYSIFTHNKNTENNLICDISLIPKTVIGIKCPNKKLNPQTCFDEVYYVKQEDVPSKTITADKYNTFSKDKIGNILKNAISINNPDEKDNTYTYLILPEKFEEELIDTKKVLACTCDNKYIIHMKIEKSTMDKIKIDEKKTIGKDICKYDVTTKVATCEIIDTIDSSVLKEHHTVHYSITLSRWDKLIIKYPTNEKTHFENFFVNPFNLKDKVLYNYNKPINIEHILPGAITTDIYDTRTKIKQYILRIPPYVHKDIHFSLEFNNSLSLTKQNQNIIYGNVAKIFIHINQGYKEIHGCDFTGKYSHLFTYSKKPLPNDDDICNVTIGNNTFSGFACLSHFELKPNNCFSSVYDYNEANKVKKLFDLSTKVELDHIKQNTSGYTLSYIIFNKESTKLKFSCTCSSNYSNYTIRITFDPNYIIPEPQSRAIIKYVDLQDKNFAKYLRKL

SEQ ID NO: 3041 - protein, 482 aa, Trypanosoma brucei brucei
LHPQQALAQTAGRPLADVVGKTLCTYSKTAKRQAANLAQTLQRASSAAKQSRQAQQLAALALAKLPDYKEAAATLLIYATHKIQDAQASIENWTGENTKLVGQAMYSSGRIDELMLLLEGHREDGANGQDKTCLGAAAGGNTVNEFVKTECDTESGHNIEADNSNIGQAATTLSQESTDPEASGGASCKITANLATDYDSHANELPLLGGLLTIHNAGGFKTGQSLQTAAPTNKLISALKNKGAGVAAKLATVTSAAPTSKQELKTLLASKGERAKLQAANDEYNNWKPGAKPEDFDAHIKKVFGAEDGKDSAYALALEGISIEVPQKPGTTESKQLYSMQPKDLMAALIGTIAEIQKAAATKAPCPKHKLTSAESDALCSKIKDANECNSKPFCSYNSTETDTAKKCQFNETKADKSGVSLPKTGPTGTEATTDKCKDKTKDECKSPNCKWEGETCKDSSILVTKKFALSLVSAAFASLLF

SEQ ID NO: 3042 - protein, 218 aa, Schistosoma japonicum
MSPILGYWKIKGLVQPTRLLLEYLEEKYEEHLYERDEGDKWRNKKFELGLEFPNLPYYIDGDVKLTQSMAIIRYIADKHNMLGGCPKERAEISMLEGAVLDIRYGVSRIAYSKDFETLKVDFLSKLPEMLKMFEDRLCHKTYLNGDHVTHPDFMLYDALDVVLYMDPMCLDAFPKLVCFKKRIEAIPQIDKYLKSSKYIAWPLQGWQATFGGGDHPPK

SEQ ID NO: 3043 - protein, 178 aa, Acanthocheilonema viteae
MYHQLILMALIGVIMANVVPFSMSNIPEEYKEFIPEEVKNFYKNLTQEDRQILRELASKHATFTNEDAALEALKNKSDKLYQKAVELRNFVKAKIDSLKPDAKAFVDEIIAKVRSLRPEDGQKLDVEKLKQAARDIIAKYEALNEETKEELKAPFPNTTKIITNEKFTRIANSFLQKN

SEQ ID NO: 3044 - protein, 218 aa, Schistosoma mansoni
MAPKFGYWKVKGLVQPTRLLLEHLEETYEERAYDRNEIDAWSNDKFKLGLEFPNLPYYIDGDFKLTQSMAIIRYIADKHNMLGACPKERAEISMLEGAVLDIRMGVLRIAYNKEYETLKVDFLNKLPGRLKMFEDRLSNKTYLNGNCVTHPDFMLYDALDVVLYMDSQCLNEFPKLVSFKKCIEDLPQIKNYLNSSRYIKWPLQGWDATFGGGDTPPK

SEQ ID NO: 3045 - protein, 419 aa, Plasmodium cynomolgi
MKNFNLLAVSSILLVDLFRTHWGHNVDFSKAINLNGVSFSNVDASSLGAAQVRQSASRGRGLGENPKEEDGADKKKKKDEKQVEPKKPRENKLKQPVENADGNAGGNAGGNAGGNAGGNAGGNADGNAGGNAGGNAGGNAGGNAGGNADGNAGGNADGNAGGNADGNAGGNAGGNAGGNADGNAGGNAGGNAGGNAGGNAGGNAGGNAGGNADGNAGGNAGGNAGGNADGNAGGNAGGNAGGNAGGNAGGTAGGNADGNAGGNAGGNAGGNAGGNAGGNAGGNAGGNAGGNAGGNAGGNAGGNAGGNAGANAGNKKAGDAGAGQGQNNEAANMPNVKLVKEYLDKIRSTISTEWSPCSVTCGKGVRMRKKVSAANKKPEELDVNDLETEVCTMDKCAGIFNVVSNSLRLVILLVLALFN

SEQ ID NO: 3046 - protein, 562 aa, Plasmodium fragile
MNKIYCILFLSAQCLVHMGKCEPNQKPSRLTRSAKNVLLEQEPMVERSTRMSNPWKAFMEKYDIEKTHSSGIRVDLGEDAEVGNSSYRIPAGKCPVFGKGIVIQNSEVSFLTPVATGNQKLKDGGFAFPQANDHISPISIKNLRERYKENPDLMKLNDLALCKTHAASFVMEMDKNSSYRHPAVYDEDKKICYMLYLSAQENMGPRYCSKDAENKDAMFCFKPDKNETFDHLAYLSKNVVNDWQNKCPRKNLGNSKFGLWVDGNCEEIPYVQDVQAKDLRECNRIVFEASASDQPTQYEEELTDYQKIQEGFRQNDQGMIKSAFLPVGAFNSDNFKSKGRGYNWANFDTENKVCYLFNAKPTCLINDKNFIATTALSHPQEVDNEFPCSIYKDEMEREMRKESRNMSLYNVDKARIVLPRIFISNDKDSLKCPCAPEHITNSTCNFYVCNCVEKRAEIKENNEVAIKEEFKQDYQYAQGESKNQMLLIIIGITGGVCVVALASMFYFRKKAHNDKYDKMEQADGYGKPTTRKDEMLDPEASFWGEEKRASHTTPVLMEKPYY

SEQ ID NO: 3047 - protein, 378 aa, Plasmodium vivax
MKNFILLAVSSILLVDLFPTHCGHNVDLSKAINLNGVNFNNVDASSLGAAHVGQSASRGRGLGENPDDEEGDAKKKKDGKKAEPKNPRENKLKQPGDRADGQPAGDRADGQPAGDRADGQPAGDRAAGQPAGDRADGQPAGDRADGQPAGDRADGQPAGDRADGQPAGDRAAGQPAGDRAAGQPAGDRADGQPAGDRAAGQPAGDRADGQPAGDRAAGQPAGDRADGQPAGDRAAGQPAGDRAAGQPAGDRAAGQPAGDRAAGQPAGNGAGGQAAGGNAGGGQGQNNEGANAPNEKSVKEYLDKVRATVGTEWTPCSVTCGVGVRVRRRVNAANKKPEDLTLNDLETDVCTMDKCAGIFNVVSNSLGLVILLVLALFN

SEQ ID NO: 3048 - protein, 193 aa, Neospora caninum
MANNRTLARRRRAFSPLTVVMLAVTLVAFMGVPLSSTGAADAADPVESVEANRRGYTSYGEPPVAVGTSEEYVNSSELAGSRDKGNAEAEEEAAEVETDVQPSSVTIDTEERAAPSQVQVQQERMEEADDAPKPVPVRSAVPSTVAKRQQARHRVIGTAVIAAVVAALLWKFSRRRSGAPREGGENENGGEEK

SEQ ID NO: 3049 - protein, 212 aa, Babesia bovis
MEAQSATETQKNLKTLMELIKTKRPFKSSDFDTLNLDYLSGQSNEELFKLLIDAINGMKENVAKVNEYLTEEGDHSLSGDELLKFVYKELVYDDESEFDKEKLQKLYKTFSEDSNAFATLQSYIQYLQPEENSQRWIQVHEPVKHRRRLNHNPALRVASPNRAVPLSHLKKSSLDPFIGPKSHREARCLNLSVSAKPQGPSIPDESEGKIRI

SEQ ID NO: 3050 - protein, 423 aa, Schistosoma japonicum
MFYSIFFIHILRIVLVDCNEYSEENVDDRHKWAVLVAGSNGFENYRHQADVCHAYHVLLSKGVKPEHIITFMYDDIAHNKENPFPGKIFNDYRHKDYYKGVVIDYKGKKVNPKTFLQVLKGDKRAGGKVLKSGKNDDVFIYFTDHGAPGILAFPDDDLHAKPFINTLKYLRQHRRYSKLVIYVEACESGSMFAGLLPTDINIYATTAARPDESSYATFCDDPRISSCLADLYSYDWIVDSEKHQLTQRTLDQQYKEVKFETNLSHVQRYGDKKMGKLYLSEFQGSRKKASTEHDEPPMKPKDSIPSRDIPLHTLHRRIMMANNMNDKTLLMKILGLKLKRRDLIKDTMEVIDQFMFNVKQPNSNATIDETMDCIEVVYKEFQSKCFKIQQAPEITGYLSTLYNYCQKGYSAENINGVIRKVCG

SEQ ID NO: 3051 - protein, 175 aa, Trypanosoma cruzi
LCLNATVRNATKVKDGFQLTEPDSGVMWPVNIPDYNKRHVFLNHNFTLVASVTIEEAPSGNTPLLIAVLANTEPTHTMRILYTADNKWMTMLKDEKKPTTESGTWEPKKEHQVALMLQGNKASVYVDGELLGEEEVPLTGEKPLELFAFCFGACGEENPSQESHVTVTNVFLYNR

SEQ ID NO: 3052 - protein, 429 aa, Plasmodium malariae
MKKLSVLAISSFLIVDFLFPGYHHNSNSTKSRNLSELCYNNVDTKLFNELEVRYSTNQDHFYNYNKTIRLLNENNNEKDGNVTNERKKKPTKAVENKLKQPPGDDDGAGNDAGNDAGNDAGNAAGNAAGNAAGNAAGNAAGNAAGNAAGNAAGNAAGNAAGNDAGNAAGNAAGNAAGNAAGNAAGNDAGNAAGNAAGNAAGNAAGNAAGNAAGNAAGNAAGNAAGNAAGNDAGNAAGNAAGNAAGNAAGNAAGNAAGNAAGNAAGNAAGNAAGNAAGNAAGNAAGNAAGNAAGNAAGNAAGNAAGNAAGNAAGNEKAKNKDNKVDANTNKKDNQEENNDSSNGPSEEHIKNYLESIRNSITEEWSPCSVTCGSGIRARRKVGAKNKKPAELVLSDLETEICSLDKCSSIFNVVSNSLGIVLVLVLILFH

SEQ ID NO: 3053 - protein, 338 aa, Schistosoma mansoni
MSRAKVGINGFGRIGRLVLRAAFLKNTVDVVSVNDPFIDLEYMVYMIKRDSTHGTFPGEVSTENGKLKVNGKLISVHCERDPANIPWDKDGAEYVVESTGVFTTIDKAQAHIKNNRAKKVIISAPSADAPMFVVGVNENSYEKSMSVVSNASCTTNCLAPLAKVIHDKFEIVEGLMTTVHSFTATQKVVDGPSSKLWRDGRGAMQNIIPASTGAAKAVGKVIPALNGKLTGMAFRVPTPDVSVVDLTCRLGKGASYEEIKAAVKAAASGPLKGILEYTEDEVVSSDFVGSTSSSIFDAKAGISLNNNFVKLVSWYDNEFGYSCRVVDLITHMHKVDHA

SEQ ID NO: 3054 - protein, 2508 aa, Plasmodium falciparum
MFIYLFIYLFFKMDKKRTFYYLFFFFTFLVYVLYFDNIKSVLRSSTKKKKKKKICKSTFYVHEESEEIKSWLRNSNERDKGKKFFIFERLIKERKYICVNKYKRNNKLKWIYKNTYEKTKNICDDYNILFKCIKGIIYDKNKETFFETFFENFWDNIFYMNKYIFNIYYYMFDYTKKVKKKIEGIKENMNIRHNNNYNNIFYVHKFFLFNDDEEKKKRNDDIKINIKLHNNTRKLSVSEENVELKPYIKQGERNETVVNLYEYFTGGVKRSNNNNEIVVTSTEQFHRIVIICFKPTVKHSHIITSPHDALNHIVEENDKIKLSEEIYSIPFYPIYGNLGLKNVITTGIVEFMIPYFSRTQMNFTVTCANGEMNDLYKFEDLIKIRIRIPRNTKKILGLSTNEKDKTVFERIVDNTSNEYRFKSYNNKIVGIKLENSILDPPGCFKTVYEDDKILQLEVFLQYVKCINLDRDNYKIRFFFLPEDFGDEEIEFSCKFTYKKKTSKIIFGLGETSVDKDIFYLEDEHVKLNINQDISGDEPYYSHLNYNGIPYNICNFQYKSEYDSQVCERTIHEFSLFIYNCDTLVGTQIQTTEPITSVKYLNSTYPINKFSDITLLSKDIDIEGLEEAFRNSKFFLTSYINHGPFPLIIECVISNSNKDYQNVYILLHLRTSIKNRSVSFCDFEKVQGYNYLNNYIDGKICNINITSNSVFGFRCPSNSIKEPKDCFSQVYIDKKVYKLNDKLSNKLILYSMKQENLAIAGFNNYISNSFSFECYCIDKNQTYSSYERTSGEDIFNHIVKRIHVHYKNYDELYDYNIHDKITYEPIMKNPPITYLCDFLNKKQILQPLNNKTKNYICTIWYPKPLNYIALNCPTNRRDEQNDQTISEVYNSLQKDLLKPTGIEQQIDQKKKELNLLFNKRNIYSNLYHLPKNAPKRTINKNGLNIVNIDEIIPGILIKDVINMKLEDVIKPDLLTPTSFLHKTYNTNKSYLFSTRNKSTSVFNTPSIYTPLTHTSFSISPKSVPLTKSRIEETHSSSNTYEQYIGKRNSIENGFFIFQLPPYLKKNQTIEFACINDSTIKNKNVGNNGIMTIHLKSFGNPIEGCYFYKNSAKYNYLKKSIKIDDLKKEECTIRSDGEIEFVGIMCPYENNLYLTPSSCFLKTYDNTDNLVELLDINENFEYYSNDKGISYLKIPQEFLNHVHLFCYCNVDKDSVSDTNVLVKKENKISLELNYSNKGFNIIKTIDYQYEADILIGYSYYFKRVTPIYRKKHICDFTTEDNSLEPESEDKMIYSCYLSLENNLNFIEVKCPKNKKSSNSEWLFKYGTFDKSSEIMEDDENIKKYEHMKYMPEDKDEIIYLFKKQKLEDILPGVIIFDKNRYFFEKGNFSFVTPLIVKEDVTIKLLCDNSETKIDDKIGKKGIILIKIPQHITDKKFYGCDFSGDSNKKSSFYYTSVYDLKTQNQYCEVKLKENIIISLNCPNGNINPNNCFNNVFLKTNMNEQIHEKIQNIFDQVKVINTKSHVLLNSSSTFLIISKITKKELNFFCTCHHNETKNVGTIYIKNEDIINFSKAYNKESSILQYIDVTPYYLKDTYICDFTQNHYSISFDTSVNVQNVLERYLKILSDLYNTHEEFTYFSIHLKLKKEIMKKKYIDYLKKKINEYKEKETSDKIKRVTLSTNDNINTILVYRCNIDLGSFDKFKIKCPSKLNEEEVENNKLYPNLIYSSNLGLDETDMLNGLTKLLYGSVLINKTEKNVSFFEKGELELIISPYTDSSKNIIFSCENVPRNLSKGIIGSASIFIKKNDNKILGCDFIDTPSTLSSASTLESSYGSHASSPLSSSHHVLHNDNQGHDVHMINHIDISNKKNSFEFEIELIEGKNTYCNIEAIENDIVGFSCPYNFLTTPSDCFESIQIEGVDKELETHKLEKLLKGVKILNNDIYKYNFTPSYIILPKKIKKSLKIFCRCNSVKLIKTGIIQINIVGDDLNNWFKKEITHNIFAYQKMDYFYDFSKGPTNISSENVLGISTMSLMSSNKKVSRKKNHKEENRTQQNVYKEIENDHKNINENVNKYDNLPVTLLSSDEGDGYQADEDIGGEDDAEDVDGEGDDEDDNILNPLRTKQVYDIIVAASEFSKIEVVCPLRNSSQFRQSKISPENFFEYVYVLEDKNDDKRKRSIEENEKLVKAILEGKKNIDGHIINIEDINNKKSSKNASVEYDDMGNKIFISIISEKPKAVIGDNISSSRSSVHISNNIMNSSFQSNIHPDPITSDTTTSEYEQYNSYFKDILVIKNINEVISFANIKIDINEQTYSSSLHIPPLILKDAEFLISCDNSLTLNENTRGKTATVKIKVKSNFLKIYGCDFVGEFSTHFLFSKKWDDIPKNYICKINIQDDMLIGLACPSFTKLHPPDCFENIIVNQNVYKKNIIMETKNMFFYKQNDKPILSFVHVKKILVETFLCKCYQVTKADYKEVTIQILYEPYVMGTPKYTLEKSIIQYRYANLKPPLHI

SEQ ID NO: 3055 - protein, 195 aa, Schistosoma mansoni
MAPKLGYWKIKGLVQPTRLLLEYLGEAYEERLYDRNDGDVWRNEKFKLGLDFPNLPYYIDGDVKLTQSMAILRYIADKHNMLGGCPKERAEISMLEGAILDIRYGVSRIAYNKEFETLKVDFLNQLPGMLKMFEDRLSHNTYLNGDKVTHPDFMLYDALDVNLPPIKNYLNSNRYIKWPLQGWSATFGGGDAPPK

SEQ ID NO: 3056 - protein, 637 aa, Schistosoma mansoni
MPNAIGIDLGTTYSCVGVFQHGKVEIIANDQGNRTTPSYVAFTDSERLIGDGAKNQVAMNPTNTVFDAKRLIGRRFDDPSVQSDMKHWPFEVTQVGGKLKICVEYKGEKKMFSAEEISSMVLTKMKEVAESYLGRTVSDAVITVPAYFNDSQRQATKDAGAIAGLNVLRIINEPTAAAIAYGLDKKVGGERNVLIFDLGGGTFDVSILTIEDGIFEVKSTAGDTHLGGEDFDNRMVDHFVKEFQKKYNKDIRSNKRALRRLRTACERAKRTLSSSAQTNLEIDSLCDGTDFYTVITRARFEELNADLFRGTLDPVEKALRDAKMDKSQIHDIVLVGGSTRIPKVQKLLQDFFNGKELNKSINPDEAVAYGAAVQAAILSGEKCEAVQDLLLLDVAPLSLGLETAGGVMTALIKRNTTIPTKQTQTFTTYSDNQPGVLIQVFEGERALTKDNNLLGKFELSGIPPAPRGTPQIEVTFDIDANGILNVSAVDKGTGKQNKITITNDKGRLSKEEIERMVADADKYKAEDEKQRDRVSAKNSLESYVYTMKQQVEGELKEKIPESDRQVIISKCEDTISWLDVHQSAEKHEYESKREELEKVCAPIITKVYQAGGMPGGMHEASGAGGGSGKGPTIEEVD

SEQ ID NO: 3057 - protein, 504 aa, Brugia malayi
MNRTTLILFFIILSNTITVIHGYVRGCYYTNWAQYRDGEGKFLPGNIPNGLCTHILYAFAKVDELGDSKPFEWNDEDTEWSKGMYSAVTKLRETNPGLKVLLSYGGYNFGSAIFTGIAKSAQKTERFIKSAIAFLRKNNFDGFDLDWEYPVGVAEEHAKLVEAMKTAFVEEAKTSGKQRLLLTAAVSAGKGTIDGSYNVESLGKNFDLLFLMSYDLHGSWEKNVDLHGKLHPTKGEVSGIGIFNTEFAADYWASKGMPKEKIIIGIPMYAQGWTLDNPSETAIGAAASRPSSASKTNPAGGTASYWEICKYLKEGGKETVHQEGVGAYMVKGDQWYGYDNEETIRIKMKWLKEKGYGGAFIWALDFDDFTGKSCGKGPYPLLNAISSELEGESENPEITTEEPSITETEAYETDETEETSETEAYDTDETEETSETEATTYDTDETEGQECPERDGLFPHPTDCHLFIQCANNIAYVMQCPATTFFNDAIKVCDHMTNAPDTCI

SEQ ID NO: 3058 - protein, 312 aa, Leishmania infantum
MNYEGHLKGHRGWVTSLACPQQAGSYIKVVSTSRDGTAISWKANPDRHSVDSDYGLPSHRLEGHTGFVSCVSLAHATDYALTASWDRSIRMWDLRNGQCQRKFLKHTKDVLAVAFSPDDRLIVSAGRDNVIRVWNVAGECMHEFLRDGHEDWVSSICFSPSLEHPIVVSGSWDNTIKVWNVNGGKCERTLKGHSNYVSTVTVSPDGSLCASGGKDGAALLWDLSTGEQLFKINVESPINQIAFSPNRFWMCVATERSLSVYDLESKAVIAELTPDGAKPSECISIAWSADGNTLYSGHKDNLIRVWSISDAE

SEQ ID NO: 3059 - protein, 223 aa, Brugia malayi
MSAQLLILSHMVLLQLIVAQLGPKIGKQFLKPKQCEITNQTVYDFQVQMLNGAQKSLAEYRNKVLLIVNVATYCAYTMQYRDFNPILESNSNGTLNILGFPCNQFYLQEPAENHELLSGLKYVRPGHGWEPHKNMHIFGKLEVNGENDHPLYKFLKERCPPTVPVIGKRHQLIYDPIGTNDVIWNFEKFLVDKKGRPRYRFHPENWVQGTAVKPYIDELEREI

SEQ ID NO: 3060 - protein, 120 aa, Toxoplasma gondii
MASVKRVVVAVMIVNVLALIFVGVAGSTRDVGSGGDDSEGARGREQQQVQQHEQNEDRSLFERGRAAVTGHPVRTAVGLAAAVVAVVSLLRLLKRRRRRAIQEESKESATAEEEEVAEEE

SEQ ID NO: 3061 - protein, 622 aa, Plasmodium falciparum
MRKLYCVLLLSAFEFTYMINFGRGQNYWEHPYQNSDVYRPINEHREHPKEYEYPLLQEHTYQQEDSGEDENTLQHAYPIDHEGAEPAPQEQNLFSSIEIVERSNYMGNPWTEYMAKYDIEKVHGSGIRVDLGEDAEVAGTQYRLPSGKCPVFGKGIIIENSKTTFLTPVATENQDLKDGGFAFPPTEPLISPMTLDQMRHLYKDNEYVKNLDELTLCSRHAGNMNPDNDKNSNYKYPAVYDYEDKKCHILYIAAQENNGPRYCNKDESKRNSMFCFRPAKDKLFENYTYLSKNVVDNWEEVCPRKNLENAKFGLWVDGNCEDIPHVNEFSANDLFECNKLVFELSASDQPKQYEQHLTDYEKIKEGFKNKNASMIKSAFLPTGAFKADRYKSRGKGYNWGNYNTETQKCEIFNVKPTCLINNSSYIATTALSHPNEVENNFPCSLYKDEIKKEIERESKRIKLNDNDDEGNKKIIAPRIFISDDKDSLKCPCDPEIVSNSTCNFFVCKCVEKRAEVTSNNEVVVKEEYKDEYADIPEHKPTYDNMKIIIASSAAVAVLATILMVYLYKRKGNAEKYDKMDEPQDYGKSTSRNDEMLDPEASFWGEEKRASHTTPVLMEKPYY

SEQ ID NO: 3062 - protein, 10287 aa, Plasmodium falciparum
MKDLYSLYEDISENDKIIISEKLKNLLNYFQDKNKSYVSEFVVVSRTRFFKSISNYGEFLLLQSSSRVISSYEHILRLLHQAKVYLEFVRCLKLNNCSVIDNEKYEEEISKFINYLESKRKKYYYHICQILIKFIVSSLSDNTIDNKFMEKEFDIEEDNIDGYEKNVNDIEIKNEEYNTSYESQRVKDNNNSNYNNNVNIWTINDNDEKIVMEPFDELEEYGNYLYNVLNQMDNKSWKDKNHAEYLKVISLNDAIIKEDNDKNKNSENNNGLTNTSNITNNMILLPKYLENVRNCIYNHQTKSMLEVKSMIEHAMSDNIKAPLFKTGKIVSEMLPSPNYEKYWSTTQPEFSNKIDTSLVQNMIFKFFNLQKNTTPVDNMTPTNYNIKFYDIFKIILKGIYSIKCENEETHIFLNQLLNKTKKKKYPFNYNNQLLDKNVKTDDLYNYLLLPLHLYNNTHEICEGILKYTIYNNDLVLTLKIVDTFLTISVYENSLKDLVHLLNTLAECIILPYLRTEIKENIKHDTGDKDIYRTGTLCKNFETELTNEFNKISDDNNNNNNIGIIDTNKSRDNINQNTNTNNNNNNNNNNDGDRFDDDQFFDNFSNLHKLICKIPLHEYESLKLLELFSLQYPMFLKIQNKPQRCLKDISKPCEYYSNTLPIYGSYIFQIVVSFEIDNSIKVLDELGSKCKICFQLTNDNMNDENSTDITVSDDNSNIPNKEYNFLEINFQQNHMYTKYNKSSVKEEDEIEKSMKAKSSTKSNDETNKANNNKNNNNNNKNNNNNNKNNNNNNKNNNNNNKNSNNNNNNNNDTFEEYEKNNKKKKKNVQVNKLINVYDITNMNTIVFDILIDQGCFSSETNVNNVTNDNGKIVIYSNGRHLLTSNINKKIIGFNEKKGLTNNNIKLKVFTSRTCSFEFPKECYWSSAFVQELVNRKLIPETNQNFLLKNPINIIELYNKVSIALNRYLYRFCEWNNGDYKRIIENDSCYTLYNNIDINTFEALIKYTENNNKILKKLYTLSKNCALDKENYMENNKHNINYYFSLSPVKYHVRKYREYIYEWNQTSDSQICALSILKLYLKNNLDVNDGRIEHNEKFYCLSERLIKSFLKIIKLKTPFINREDFYVNNNYEMEELDLDGSLWLLRRNVFQILLDADKIIMSNIFMRINIETILNLLKFFSDNNSLDSDMILKLLKSLEEKGILEIMMKRMLSTPCKDGTQYNNSNYNDNSHYTHNSLKSQNISSSTYSSSSSSSNLYNTNAENFNDIYTNNNGEEKRKKRKYYEENMHEIQRYEKRKRNNKSRIIDTTHFGVFVEELMTLIEHQTNNAINTPVVNHIEESDVFMENKACDVIHKLCSFYNDEIKSEVFLRNYNHFNLCIKILNEIKKKNNHVSSASEVASIFLRGVVLMLTTYILTIATEYESTKTFLYKPVIPFYNLHNEMLKKKKDIHVYHGEEIKQMISMNSKSMKDRYNNQFNQYGSNNKSSNLTNQNIDILKCDMEDVSSCNSRYSSFINQNWELEYNKKIKKNNSISNNEYNKKGDVESRDHANSWIPLISNQNDGSIDGVIIHSDDSSSQSFLVSKRKVYTFGRKSFESVNMYVDDNEEDEGEEDKSEDYEYCDDEQQNDVYEDTEEESDNYHMRKERRVHQKKKNSKVSINKKTNNSLSDDNNYSSDELEEFYLRKNLLDLCDNNNNNNNNDEPNNFKSQLNEILYKLSKKKKYARNSKKLKLLKKKIIKYKNVSKKLNFIFSLLEEILKIMLSVGLRVLSSISYHYLYEKNGIYKFINIFGSNIIRSNLRDKGSFLELCENMIKPKCLTLLQACTFIISGIIPCLGYVTTLFVDKKANKYFYIKELNNYLSLKMALNIWPMFLKITLQGLLTSRHLSSEMSVHKDNLHPIAECCISITSLATHFLTLFTIMIDNLSRYEIYFNLKKGMNTLGNNYPIPLILINSAKYIRIESKKNKYYDIEKAIRTILLQLTDCSVCDYENYVFNHYMVPQSISSFLYATRMNNDSNLENEHSSNNINAHETDYHDISINKNKALGNEMVKTYQSMYEDDYEQERIGIRSRSRRGIPLKKKSERNNSKEENVNNMDHNNNNNSNSNNNNFFHRGSYSTNPRNNNITCDRKNMEFLKKLMKNDHDAVQCLGKAYSVFHKNFERAQIAFVAVFLHLTGYKHGQIKGPHQNYNSAKNNNDNKNDHIIIEDSLENKKIKIACNLARQGVIDLISKSQASQYHKKSIEEYNTSSKNKKCKEEIQEQMSMEHFEGNNKRMNNVKSGSHNDFKNLVRESHQNINEIDPDDNNKSNVYSSIEQVNDLPLNKKKSPILHLSSDLDEKNDLNFCNFSKEELNYVNDVHPNGEKSSHNNKSNEFLAMDSIQKKREKQIEKILQKCEWIINTYPFGLCPVSVKENISQEWDEHFVFMRRNSYDIPITVRKMYSDRSNYQMLHEVATMPAVAVEPSVSSLSYLDQLFSHQNKINDDKLECIQFSTENIFGKSTTKNLFLLKKLLKTYKRNVCIREPSNQLDTNKYDKICLENNKQFHTYICNNKNVNFSNSCASCDSGEGNYYNDESNYYMNFHFSEKNNDHLSNNSLVLKYNNLCKTNNLEKFGELWLNARSTKNYVYHNDQDVQHIDEFNSNLMNYKPECFLFSLKSVDENDYIMRNENMNNVKWDPTGSHITKYTNSMFDYYDNASDMNLSELHGKFNAFYKPQKIIRSMNKQEFLPALYQEEMLRNQPYHTTANNNTTNIINTTKKKSFPSFDYFRNKYLPNNSIDFTINNAVDHTIDSKDMLQLKEILKFIMNDTDLETVLNIIRIEQLTSLCRYLISRSLKSMLCAGIFGGIKNPIVNMSKKNLSSNKRSQKGYNSNSDDIKKKKKSNCNENEGSLDKYNDKEKKNDKINNGDTKNSDDGKIDMDDKKYYNDDLKNSDYSKNNESNYLSLSKEPDDMLLPSPNYEKGISTCVKKNRFSVLSEAYKEENLLVNQRKYKNLDLNQKIFKNDKRKKGIFEQWRQKSTKSMQWPVILDLLVPSFSRGSYNECNRMISNMESSLFSVQNYGWMLLKLLHIIIIKFRSLTPLKTIMREIDEKNRNSNNNNNNNNTNNSNNSNNNNNINSHYMNQWNGSNIKDPFEYHYWFTQPMEYALSFTLTDITKSICIWYLRYNRKLIMNSSSFSEIIKNSMNTLWIESVLRLIALQICLGVKPLNDSRYVVPFLYHMFTICQPLLREVHISGDYLKKKLLVGNKILYYSNKNNSFLQVKCSYCHKSVCMSSRKMSSKMSPMETPLKSIRKGNSSEVSSKISYLNGHTYSNNDNRDNYDDDNCDNYDNYDNDNENDNCDNSKNDRGVKGYIHSERVQKKQKKIKHKIIKMKMYNLSEQEHEEILDNVITGIIIYHQTLQNNNQHINKMIILQNLKGFKIKEEYYTNENHYWALCVQQYKNSPLYTLPLKNLNKCIKHNNRNIFQTTKMNESDDTSCYYWSVSGDPVYNIYGNAKSISDVQLEICAHKKYDSNVRSYLKKNNFELEFSINTHMNDVVNIWIKRKSIIINKELIEITDHHSIPLFSKGKQKKEMQENEDEKIKNKGKNKTKTNDDKKKNSSINNNNDCYDINYKYDTYNHEENDGSHKEENKKYSNENENVEYLSEHFCDCMKVYTDQDYSNEDYSNDYNYNCDNYKNMYSDDKKNRDLYDHGDNNLNYKKLKLISWNLIQTILWGILVSGENVQMENSDQVISESTTKYIKKKICNIQDEIDVNGNNHNDYKDYKYAFYKLQRKSLIESVLKMIMSVLIKLCNIVKLYNDLTKNKKGSFYICINNTKISMKQVKDCERMITDFMYALIKCVQNSSTAAVTLLRCFLFGQDNPTYRFRKLNKIQINCKFYRLITECIKKAPSDADDISIFFNTYLDKKKTLMNNDNDKINTKTTKKTKKEKTTKCYKNEMYDEKATMENNKKNNMGDLKWNEGEAPAHPSKDKSKHYNDNNNNNNDDNNSNNNNDYNNKDHINYPDDYVYNNRCIKYKGMDLKMSNFFFKYYDTNMKKNYNESKIHGFFLLRCLPPIKMFPKQLVIQETQKLFQNENNFLFNSKKDGSSNNDKNDNSNKNRNNYNNNDDNNNNDDNNNNNDDNDDNDNINNNYNNNNNNNNRNNSNSNNSNNSDNNNINYYYNNTDYQIGEHNNMQIHSSSKENTLYPDDHQNVDISTTTNEGNSQCNSINNILGLIPRISYRNHPFDDLPQSEFFMSSRPSDDFEAHMEGRVLRVLRGLNLGGVVLCLAPLTFPALHVGPNEVNDIINFRIQTRGRFGVTVAPAECVLSNVSEVFDRNDVVGFRTNMCPPFRHDVFAANVQYELGDLLSVKFNVEDQQNQKCLRTELMVSGVSIGSVLEVLFEADSQIEFERRMNLIFIFQDPLTIVYEGPTFTMQYVDPNKNNANNFRNDKKNADEEFLNELYSLSGYDKKNFKKELRKIRMKKNEFYESVKLYQSILESDNEILKDLKHEVIIRMNTSLTNIVSYFKHLSSNGVIFNSENDYYYWNDTDDTLLRKITTKKKKKHLYNMNCNNKMNEKYELISLDTLLSNDEKKKKMNNMNILNNPNFKTKGGKKKKKINIHLSNDKEEDKDEEAKYVEGIKQEKHTYYDYSNNSLLYNENKDNSVDNYYSFGNKEDGNRDIFSYSEEKHYNIITYDNSQITSSDKNNDPNREKILEKKNFQDDSIMSNRQSDNKEEGTSFNLYADSSIYVNMNKKYKSHVDIHKTIREVLSIICVLGLNINGEPKENKQEKFSNDTNYIFDELPWLTSLSDLKNSVTYNLDRKCLELFFCNLVDIICMDVFLGSILNFVTHNINENNQRCTRDKHNIVSFKHNKNYKKVIQKTSELDSECYPNEEYNDEFFENRKGSPYFPSRSKNGNINSDRRKNYNIQNSDNSNIGDSELNVNVNDNDNSSCGSNSKDSLNVHARNVGTDINSSSESGNTNSNNENSLRNSIFMEENETIESYRNKTKRSLSKDKNAGDLSNDNTEEIYHNNRYKKEKNKDEKNKIKKNKSYKNKTHKNKKQKNKSSNADKMNKNSLYGYTLCLIGTKSIMCCCIILRTLLEMNSDGYYEPNEKMYASCKRLLNFIKLFFFIDIGISDVLIKYFAEKNKMMDMNFLFDKRKQTQNGNNNSEICSTSSFLNSFVKNTNGNNKKKNNNHNDNHMDCMNWKEEVVFYNQKYHDNMHTKDLLNNKEDNQSSYISTNGKNKDTKDAVQNEYINILEIVNYCGIPNNFLEYFDISTPTIKNQQVIAQNDSFDLWIYIMNLLICFNSQNKYSLSFPQSINQLSENSIKNTLFDLEYSKFYFSNKILRKSVKFYASWLLKKYIIDMTCVMASLVPKLFIDELKTNLMKINEGVRSGEEIENMRNVQNKYTNSQDSVNYSSANTKEMNHKTIVPKCCFENEKTKLDHVVNNKEGHQMGFDSFNDKKDGLHNIHHAKSCEEKNNTKSNSYNNYNNYDNYNNINKYSCYNDKEEYQHELLCINNDYTHHNKTQGNFNDKLMHAKKKYNSKYRKVNKVEHIGQLLNAHLRNKEEILNIFSIMYLFRICIYYLGRSKDFRKEDYWQNFQGQLRNAKIKENVYKLLNEKSCKSSLLFGWQRIFYQCVVSWDDEKLVDQLLIIIQSELLYHLIGSVAQSMSQKRVKVEQFYAISPSVHVAHWMIDTFVRHPLCPSKIRSCCITPMTVTSLFGLIMNGNRLPIFLGIDVCRLVYWCCVVYILQNNQMHKHYKKLNNIDILTQLNITMEEPLNNDLEYTTCANQKKMITKNYHNTKSNKQHNNYFSTRGKMQKVKCNYYSFLSYVFHCVNICGSSVINQIISFNNNDVGYKNNVNKNKGNDNVSNNNNNNNNNININSSSNNNNNNSSSNNNNNNSSNNNNNSSNNNNNSSSSNNNNVRNSNNEHVNNIIDNLNNNINDILNCIQNSSNNRVLNNHFSGISSVSNETIYNLNITNRRNSHNISSNNINNTNTLQENTETNNTSNVNNLGGINSLYVNGTNGNLKTDKILLHNFSNFDLMENKEPSMYNSMKMNASLLVHYFACAAYYIKRADVYNIMNYYNEHTHANFKQYCLYLYVVDHVSKIYSKHIKRKINLKKKGGKKDDQLMTSSFFSDLMKKDPNEKSHMCYDDYTNNKYDNNNNKNNLVNNENELIVRKDSKISSKNYSFNSDYKHADKTKCRKHTYDESYKGQYPELFVDDVLHIPKKLSANIIINMNEKIHHISSSNSNTIKIKIRDMFVLPKQNDKSFIHKGIFSTHHNKPFYDKEDKYMFGEKNIVEHKNKQKQLYADHSNHQNKKHFTYNENKDKFNDKSNCNLKQKINRLNSEENERIEKINQKNFKHPNIIFSADNSFNYILHEIKFKKIQEFVYLNSNVIDEKVDLDTIEKITLGSYIELTDIYNLPGSFFLIGNSELYSGSSNLCSSSFTISLILVDNNADNMSDGNFNNFPNIEIGVINRKKYFEIKLEEDQNEDEDKIEIEIEEEKENENEKEVEKDENVHDEKDKVEQIEHEKKKEKDDKEAWLLHYDDGKDTNVKVKKFSNCRISKNEEDNIAYRLRNKELLGEKNITSKNSKFLYDKNVVDESLKCTRKNEDEYEGTEKRHSSNIPTDINKIAHVSLTKYINNEKIEKSKTRGGKRVQNVVEKLRNTLNDNNIKEDILNENHNKNNININSNINSNNNMMRGKMFHENLCDINMKNLGSNFYHSKYADLNKTNYITLNISDGNVNSKGFDCTDNNIENMKELLTNKMSGILNITVQIVGKKILWFANNILIFCKDFSYEMKEFLPFLKVSPIESKKIPKNNGSNKPSVHMKFTEMNEKTFVSPLSNFYFKFENMHKLKYENDCINTNKLWSKCLWKPVFFILPDVNNNSDNNVDVPGTSTHDLVSTKMNTHVNVNNNNMANNTNDTNYLNHSIIKKKMVPSIIPQSSNEIVIKYNKYHNTYGHIEYEDQFANTLFVSPNIQIKSEPINITYYMYCKNLQGKKCKLLCMENIKNIRTISIKNYYGFINLCNQYKHNEKPTSSSMEQKNSNNNVSYSHHNMYQVQQKPYSKIFDTRKNVESENSNNKADSILKQHLNRIINKSEDLRINNKGTLDICNKLLLSNECKTNEKKKKTGSNNIGSNTNIHELSDNNRGQHTSYYHEQLLSESLSKNVIHSNYINDYFTLNNDNKNNTSSSSNNNNNNKNNNNNNDNNNDNDNICSNSNNNVHIKYKLNQIPKIRKHIHHNIKYSSIQEINDNSHYSNKNIIEEKKQKENSNDMHNPKKNEGHYYIADPSNEKEILYDNKNNENGYSNNFLDDNNALHKHVHNKITLKGSNTYYDMDKIKDKQIEYFSNDSSNYSLYYIGCKEFKLCIDSYDSIFPAKPFIFNCTVNFKEEENYYHKKNYLTNSVGIIWGIYRWLWKSNGKFICPLRLPLCVSEFPSEKIEECEIDVVGYKSNDNLCIEFQPLYQCLLFYKNGTYQFGFKFDTFYNYRNLKNTFLSEHNGDMNMDRVHQNISKLSYSSSISNANFNDNFFVKRFVHNKYEQVSTEKNDLQKMSKKKDDKINNYDDNMMNNYDDGNNNNNNNDSMNNHKDDMNNYNDNINNYVESMNNYDDIMNKGHVVTQNNLTLNSEHNTKVNISNFFPLSNMSSVSNMYTISNERKSSNKGNGTNNVVKARVERRGKYKGMNGININNDNDRDEDNNKDKDDGNHDNVNNINSFYNKDRMISYDNLKQEKQNDTVMRIKNHVNMIKLYNCLLLNDCENVSSILINNPELLTKSNENMSEISFEHYYQMNSDDFPYELISSMKNIMHEKYLTPLMLACRIGCEECVQNIIEKGKVNPNKSCHRIEKETPLMVAAQYGHSRIVCMLICVYGVQVNKKDIKGNTALHKILLNYSNTEGKKNSTIKIVQLLLKLGADLTIKNKKGISVEDLVQKKLIKNEKIENLLNIWITLIIKNKKKHEGRYIPRNIIPGLLSNCSIVVGFPKGINGNVPNECGVKINSFVVGGEELVNVRYHKEKPTKHTFDNNYDNNYDNNYDNNYDQDGGNNIYNNAHSNVYNNGDYKNNLNKDDHPCYINFNYDKLNYNYNKWRVRTKEEEYYSCDNSSSNSSISKFGNLEKKIIEDHEKYKFSKYGGYPNGLCYKGEKNTHYNKGFEGMNSLEFDAFSGCKNMYEDTYDKENEEKLLYNNIKDNGLKEIDQEINHSNDNIKAFLKDDDEKDDDEYQKPYDKKVINKNKNDNYDKNDNYDKKDNYDTNDKNDKNNCDDNIILSGGKKDKRNKKVMNTNSSGRRTISKNSPNLSSAKNIKCSKTSTYNSEKYNSNERNSNLENHAIPIDHKDSVDETFVFIEKQKRNNKINTNDSMTYNPVTHEKENILNYILVHTYIDGKLGIRSASNHDMETEHGMDNIFETENKKNKALNSNMSNNNNNNNNSNNNNNNNSNNNNNNYNNNYNNNNNNCIYQEFYMLRKDKKKRKHLILSNLQNNLFNYHDLKYSLIEFINKSGVFSDIIKGHSYLDSKKKIPKFDELKNSLIEANNELDIIKGFKKFLELFDFLYMDDRLKYFLNIDLRKNLENSRNIVDLGYILLKIDSFCCIFNSFKLQWKDNSHEEWKKKLLKGIGILNEFSDIKWITDSYTIFKYEEEILESASFIDKILQNGNYMVFYNNLMNMIHDKNIHLKNGLYDSHIFNDMLKNINIEHFNRDTILYDICSKQNILKNYFIQERNKKYAMNNHDSRVINEKYKNYMNEYFVNKKLKGHSNNKDLYLSMNDSEDELIYSKEKKYKKHQTCDKYIYKSEMKEEMYNKSNELYNNSLNNSNNINNHSEFYNNGVNRKGDHTYANEKDLSMTSLDCKNHMYGEPQPKDKTYKKGMYDEERKQSMFNTSENTEQHDLINKVSGKEEDVRKPKQRNIRSKRLEDIIDKMYEDNDISNRENSKKNIDGLNNISGNGRIKFPSYSKNLLRYRNGNFLLNYSNNIFEKGREDESLNSHSPRVTSNLLASYSNERHGIKLAFMNSGEQGKVMKHTYNDNVSNNVSNNNNIQGEYNHKGDVPHNKFIEKNHYTKNGTNILSSLNKHNHLNTQEENNSLENNYSCETFCDEYDSEESEFELICEVHFTSKPNEEIMTREQFNKMWPQTLDMYILHIYDLISSYMDSPEKISLFIYHAFDMEKIKKKLPSKSSQLWKRINMSLDDFIEEIKNVHNYTMRIIYQSNYKRYGMLPPNFKKYFTLSEECLKNIAKNKIIMNMDYYKNYIYEENKKMFLKIIQDRIYLLNKFNIYFENCLPITSILFNKPVINLEEQGLRTLECPLCFFMSNDSYFPWTYKKRNTHLFQYNNNNNLCLVQKMRSELYDNNNLMSKNVSMLSLYNNTNYSNNDNNSIVGQSNYPIKVEGNHINENYKNCAEHNHYDYSLNKNYSNEKSIYVKNSKQIDDIKKIKSGNEYIIMDSIQSLDKNSTIVKKGSFFLNNGKGSYNSYTEIEDKDWLLGNVENLNNHNIYPDNEINYKNNNHEDNNYNCYQNHLCGNESEEENEIFDCEKYCKNMYTSNKMVLAMGSSDLPIQLSSYLFIKKLLKHDTCLKLWKECLKYITSSSSEKSNLTLRIDRGMAATAKHIAHTMWYQSTYSLLNIDTDKLRGKPRDRPFMVVFVGEGATDFGGPFHEYLSSISREVMGKLSDSPDKSLPVFPLCIPCPNYTQAIGARQDTVIINPQSTPYVVKEWDYIGEVDVIDNLESFRWQILNIYNSIKDIKKKLQKTAKDSYEDYKQKMEENGSDDGLENIMPVKGKSKTKGKYKKKNKSNKMNMGSDNILKDGVHKDNNNQKGHKYDEKNICNDKNIQEMTSKEKMYFYTSKKSVTFEKLEENEKMDYQIENKYDYPFVCDACEYDSDIYEIINNASLKSRKLFMNKIWKKKKCLDDEGDKNVLLRDPHENENMRDDIRNNMNNNNNNNNNNNNNNNNNNNNNNNNNNNNNNNNNNNNLNSIGGSKNTMTDGKKKNKFIIDYDEKTIKAMELAMYESLGRVMGMCVCIASALNICFNPIIWKKICGVPLELQDLADYDFVAVEMLKTLKMLNSEKSNEWNMELKQSLGDMTFITEDSGGNSIELIKNGMNIPINFDNLGLFIRLMTKCKMNESSKGIRHLLKGFSSVIPLGRLRLLYDFKDVEHMVCGEREINIEVLKAHTWSNDLNIKDKLFTVLEEFTNEQLQSFLRFVSGRSRLPTTKNDWYMIIDVENPNKNISQIDQRLPTAVTCGFRLLLPQYSSLDILKERLLYAIKNCTAIDLDAYVVHDQMQLMYGE

SEQ ID NO: 3063 - protein, 162 aa, Plasmodium falciparum
MKILSVFFLVLFFIIFNKESLAEKTNKETGSGVSSKKKNKKGSGEPLIDVHDLISDMIKKEEELVEVNKRKSKYKLATSVLAGLLGVVSTVLLGGVGLVLYNTEKGRHPFKIGSSDPADNANPDADSESNGEPNADPQVTAQDVTPEQPQGDDNNLVSGPEH

SEQ ID NO: 3064 - protein, 363 aa, Plasmodium knowlesi
MKNFILLAVSSILLVDLLPTHFEHNVDLSRAINVNGVSFNNVDTSSLGAQQVRQSASRGRGLGEKPKEGADKEKKKEKGKEKEEEPKKPNENKLKQPNEGQPQAQGDGANAGQPQAQGDGANAGQPQAQGDGANAGQPQAQGDGANAGQPQAQGDGANAGQPQAQGDGANAGQPQAQGDGANAGQPQAQGDGANAGQPQAQGDGANAGQPQAQGDGANAGQPQAQGDGANAGQPQAQGDGANVPRQGRNGGGAPAGGNEGNKQAGKGQGQNNQGANAPNEKVVNDYLHKIRSSVTTEWTPCSVTCGNGVRIRRKAHAGNKKAEDLTMDDLEVEACVMDKCAGIFNVVSNSLGLVILLVLALFN

SEQ ID NO: 3065 - protein, 997 aa, Plasmodium falciparum
MKSYISLFFILCVIFNKNVIKCTGESQTGNTGGGQAGNTGGDQAGSTGGSPQGSTGASPQGSTGASPQGSTGASQPGSSEPSNPVSSGHSVSTVSVSQTSTSSEKQDTIQVKSALLKDYMGLKVTGPCNENFIMFLVPHIYIDVDTEDTNIELRTTLKKTNNAISFESNSGSLEKKKYVKLPSNGTTGEQGSSTGTVRGDTEPISDSSSSSSSSSSSSSSSSSSSSSSSSSSSESLPANGPDSPTVKPPRNLQNICETGKNFKLVVYIKENTLILKWKVYGETKDTTENNKVDVRKYLINEKETPFTNILIHAYKEHNGTNLIESKNYAIGSDIPEKCDTLASNCFLSGNFNIEKCFQCALLVEKENKNDVCYKYLSEDIVSKFKEIKAETEDDDEDDYTEYKLTESIDNILVKMFKTNENNDKSELIKLEEVDDSLKLELMNYCSLLKDVDTTGTLDNYGMGNEMDIFNNLKRLLIYHSEENINTLKNKFRNAAVCLKNVDDWIVNKRGLVLPELNYDLEYFNEHLYNDKNSPEDKDNKGKGVVHVDTTLEKEDTLSYDNSDNMFCNKEYCNRLKDENNCISNLQVEDQGNCDTSWIFASKYHLETIRCMKGYEPTKISALYVANCYKGEHKDRCDEGSSPMEFLQIIEDYGFLPAESNYPYNYVKVGEQCPKVEDHWMNLWDNGKILHNKNEPNSLDGKGYTAYESERFHDNMDAFVKIIKTEVMNKGSVIAYIKAENVMGYEFSGKKVQNLCGDDTADHAVNIVGYGNYVNSEGEKKSYWIVRNSWGPYWGDEGYFKVDMYGPTHCHFNFIHSVVIFNVDLPMNNKTTKKESKIYDYYLKASPEFYHNLYFKNFNVGKKNLFSEKEDNENNKKLGNNYIIFGQDTAGSGQSGKESNTALESAGTSNEVSERVHVYHILKHIKDGKIRMGMRKYIDTQDVNKKHSCTRSYAFNPENYEKCVNLCNVNWKTCEEKTSPGLCLSKLDTNNECYFCYV

SEQ ID NO: 3066 - protein, 585 aa, Plasmodium falciparum
MNRILSVTLCLFFIYLYIYKTYGKVKNTDEGLSNIYGAKYYLRSGLFNEKNGKGQKYEDLEEEKEGENDDEEDSNSEESNNDEENELIKGQEGVEQETHGSEDEVSNGREDKVSNGGEDEVSNGGEDEVSNGREDKVSNGGEDEVSNGREDKVSNGGEDEVSNGREDKVSNGGEDEVSNGREDKVSNGGEDEVSNGREDKVSNGREDKVSNGGEDEVSNGREDKVSNGREDKVSNGGEDEVSNGREDKVSNGGEDEVSNGREDKVSNGGEDEVSNGREDKVSNGREDEVSNGREDKVSNGGEDEVSNGREDKVSNGGEDEVSNGREDKVSNGREDKVSNGGEDEVSNGREDKVSNGGEDEVSNGREDKVSNGREDKVSNGREDEVSNGREDKVSNGGEDEVSNGREDKVSNGREDKVSNGGEDEVSNGREDKVSNGGEDEVSNGREDKVSNGREDKVSNGREDKVSNGGEDEVSNGGEDEVSNGREDKVSNGGEDEVSNGREDKVSNGGEDEVSNGREDKVSNGGEDEVSNGREDKVSNGREDEVSNGREDKGGAGTDGELSHNSESHTKNKKSKNSIINMLIGM

SEQ ID NO: 3067 - protein, 378 aa, Plasmodium cynomolgi
MKNFNLLAVSSILLVDLFPTHCGHNVDLSRAINLNGVSFNNVDASSLGAAQVRQSASRGRGLGENPKNEEGADKQKKDEKKVEPKKPRENKLKQPPPADGARAEDGARAEDGARAEDGARAEDGARAADGARAADGARAADGARAEDGARAEDGARAEDGARAADGARAADGARAADGARAADGARAADGARAADGARAADGARAEDGAPAGNREGGQAGAGGNQAGGQAGAGGNQAGGQAGAGGNQAGGQAGAGGNQAGGQAGAGGNRAGGQAGAGDAGAGQGQNNEGANMPNAKLVKEYLDKIRSTIGVEWSPCTVTCGKGVRMRRKVSAANKKPEELDVNDLETEVCTMDKCAGIFNVVSNSLGLVILLVLALFN

SEQ ID NO: 3068 - protein, 223 aa, Wuchereria bancrofti
MSAQLLILSHVVLLQLIVAQLGPKIGKQFLKPKQCEITNQTVYDFHAQMLNGAQRSLTEYRNKVLLIVNVATYCAYTMQYRDFNPILGSNSNGTLNILGFPCNQFYLQEPAENHELLNGLKYVRPGHGWEPHKNMHIFGKLEVNGENDHPLYKFLKERCPPTVPVIGKRHQLIYDPIGTNDVIWNFEKFLVDKKGRPRYRFHPENWVQGTAVKPYIDELEREI

SEQ ID NO: 3069 - protein, 2548 aa, Plasmodium falciparum
MEYKLFKNKKILNEKVNELTKKNRQRNTLDHINCIEIDDDDDDDNDNNEEPKEMNINKTNNNNNDILMKSCNDIRRNTTFYRHNVINEEQKNFEYLLSRKKKNVDSIDNVNFYDFMKNDFFNIFNNNIISEHKKTNQIVNQINNNVDTSKNVVYNINYDEHKGEVVNLSFDKKGKETYPQVDIELYNKKMNPRYQNINEQNTCQTSDDNTTYRNVYSDNCALNSSYTNFLRNKSLKYKKCYKQNRQDESTGAEFDYNLDESVYYDDCNNKLYKRSFLKNNKNIIEKGREEHKQDIYNNISDICKSYIKNFDYLNKRIFHNKSKIWKLSNKKVTIHGDPKKRIERNKQEIEDHRREQDGENDQEEDNYDDYDDEDDDDDNCHIYDNYDDYLENDDYDNHNYFYHKNHDVNKIRKIQNKNCSTDFINYTSINNRNMECPNKNADNLKNMDSFLLYMKERKIKKKKNINDHMENQLSDTLNNSNNYNKDVYDSYYDDMNFCYDKDYNMILKKGVNSNRTKSLDRYPNNISHNYVNNISSEIIKYCKDNNITLKSDIKNIINHFNKKYANSSLTNSKISMYENGYPQRSVDRIYDSSTNDPKSDMNGSNNNNSSSNNNNNITHITNDCDNTQTNKNKHYVNSIVNSIVNIFQKRKNVNEKKENINEQNCISFNTNLRNNKLNNNDDLCSNSYVNNINRNKQITNNENKKDNMLMLKGTYHGDSLNESINIEHNLKNNNSMSDVNFVLNNNDNDKKQNSYDISEVSINCYYDDVIKCYMDYTMHGMEDETNFYLCEFCEQNIFDMNNMIKKDKAKECMYRCNISCGRTFHKACVCYIKNNDNYICFFCLYDINFCTLCKEVLTNDSLLPCYYPLCSVSMHTKCVEKLLLFNSHCLKQYESIILPRDINIEQQKNTQKSASDGIIEQPLNIKKKIKRRHIYRKRRRRGPRKSQITTSNKKINKSELAGGSIINGVDMEQENDQGGNNNNNDDNNDDNNDNNDDNNDNNDDNNDNNDNNDDNNNDNNNNNNNDNNDNNNNNNNNNNNNDNDNNNNNNCDENFKNHLLKKDLLRDEPHHNNYDKILECNTEIKMENNVNMSEEPIYNKLFNGKEETLNNENDEKIIVLKKFICPLHICYVCKEFDINNTESSKKELKNNLFRCIKCYKSVHRKCMNQLKNNDNNDNDNNNNNINIYIISHKHRIICCANHMDDYKKEHMEYLKYIKEVKDICKLDEPIHNNNNNNNILSEKGFYGDENNLSISKFHNNSSYEPIKNKETCIKGKDSNYLSHDNKGITDMNNTNKMNVLNLKSCMVNDMNTSERKKKKSCESRGSNITNKKVVFDLTDELNEKEKSPPLDNVQNKIIYGDNEIEKNVNICQKEDGGLNLGSMNILSIGKNHMRTNNNNNNDSSCSSNNNIISVENEYILKNKNLNKSNNSLLDHNNKIKKNSTLNIKECTDSCINVDEFINKNQNEKDISLENIDALCIKRKRNVSHPYNDTLDDTNILKDISNNKSYYVNISKKKRNVSFNYKEEFMKGDEQFLLKGNNLESNEKNTKNKLCNNDNNNNNNNKGKNTKYNTLDRKNNKNKQINDTINKEPENINHNMQNQQLTDNFVEDNMKYKQEIYHIKLSHILSIEKGLLSLQEINIDQMNDECKKHISILCTFRQDFINYVIFLFSKRLHKENQIEPVNGVDHKKEGNIYHAERKQEKINHNAKHNEQGSINNAKHNEQGSINNAKHNEQDSINNAKQNEQDSINNAKHNEQDSINNAKHNEQDSINNAKHNEDDSLNNAKHNEDDSLNNAKQNEEDSLNNAKQNEEDILNNDDHRNQEELHERWKENMVYNFLANYDKKEKKYISKKEEDAIIKILSNDIVGIMKKELKISLYDFIMLKKKTISTNENHKDNDESVVYVEDGKHHCNDINKMKDNVNNDIIPNIKYNNNNYDDVINTKEKESIPDASYMKVTRNQSIMNNDIYNNNIQIIEKERIMNNNKKNYYDEEKKREEYNGLFSKGKKKSFKNNKMDLKTFFSLTNNGYKVDISILKKYSSFLKFEYISKNIYLNDKNKNLLACKSDDYKCLCQGECNLYTCYNSLSNIQCSKSRCNLPEKIQDRKCFNRPFRKSFVKDLEIKKTEKTGYGVFCKRDIKNGELICEYVGEVLGKREFEKRLEVYQEESKKTDMYNWYIIQINKDVYIDSGKKGSISRFINHSCSPNSVSQKWIVRGFYRIGIFALRDIPSGEEITYNYSYNFLFNNFECLCKSPNCMNYHLLKKGESSGASNIIKETELLNNTIFNPVENFHNLHGKMQDWNIFIEEAHTRLLYEYNKMNAFNLRLMECYSTWIFYDMNFQKNQFFSLKSKPYNVSAEFWKVLVSAFSDGEKNIINTFNLFLPSLIKIGQLRRIQQYSYILHNIIGLEHDMWNLIDKGFADDEVCRKCKSCGNLTMCDKCFQSYHQLCGNMHSKMYKNNELVLCRFCQKYDYKIQWIKENHGSKMKTCIEIRSKAFYKLNRDIMTLLEESVKYTQNQSLDSIHAHNTKAFKSKKLKLRKFQYKYVKI

SEQ ID NO: 3070 - protein, 429 aa, Schistosoma mansoni
MMLFSLFLISILHILLVKCQLDTNYEVSDETVSDNNKWAVLVAGSNGYPNYRHQADVCHAYHVLRSKGIKPEHIITMMYDDIAYNLMNPFPGKLFNDYNHKDWYEGVVIDYRGKNVNSKTFLKVLKGDKSAGGKVLKSGKNDDVFIYFTDHGAPGLIAFPDDELYAKEFMSTLKYLHSHKRYSKLVIYIEANESGSMFQQILPSNLSIYATTAANSTECSYSTFCGDPTITTCLADLYSYNWIVDSQTHHLTQRTLDQQYKEVKRETDLSHVQRYGDTRMGKLYVSEFQGSRDKSSSENDEPPMKPRHSIASRDIPLHTLHRQIMMTNNAEDKSFLMQILGLKLKRRDLIEDTMKLIVKVMNNEEIPNTKATIDQTLDCTESVYEQFKSKCFTLQQAPEVGGHFSTLYNYCADGYTAETINEAIIKICG

SEQ ID NO: 3071 - protein, 351 aa, Plasmodium knowles
MKNFILLAVSSILLVDLLPTHFEHNVDLSRAINVNGVSFNNVDTSSLGAAQVRQSASRGRGLGEKPKEGADKEKKKEKEKEKEEEPKKPNENKLKQPEQPAAGAGGEQPAAGAGGEQPAAGAGGEQPAAGARGEQPAAGAGGEQPAAGAGGEQPAAGAGGEQPAAGAGGEQPAAGAGGEQPAAGARGEQPAAGAGGEQPAAGAGGEQPAAGARGEQPAAGAGGEQPAPAPRREQPAPGAVAGDGARGGNAGAGKGQGQNNQGANVPNEKVVNDYLHKIRSSVTTEWTPCSVTCGNGVRIRRKGHAGNKKAEDLTMDDLEVEACVMDKCAGIFNVVSNSLGLVILLVLALFN

SEQ ID NO: 3072 - protein, 622 aa, Plasmodium falciparum
MRKLYCVLLLSAFEFTYMINFGRGQNYWEHPYQKSDVYHPINEHREHSKEYEYPLHQEHTYQQEDSGEDENTLQHAYPIDHEGAEPAPQEQNLFSSIEIVERSNYMGNPWTEYMAKYDIKEVHGSGIRVDLGEDAEVAGTQYRLPSGKCPVFGKGIIIENSNTTFLKPVATGNQDLKDGGFAFPPTNPLISPMTLDHMRDFYKNNEYVKNLDELTLCSRHAGNMNPDNDKNSNYKYPAVYDYNDKKCHILYIAAQENNGPRYCNKDESKRNSMFCFRPAKDKSFQNYTYLSKNVVDNWEKVCPRKNLENAKFGLWVDGNCEDIPHVNEFSANDLFECNKLVFELSASDQPKQYEQHLTDYEKIKEGFKNKNASMIKSAFLPTGAFKADRYKSRGKGYNWGNYNRKTQKCEIFNVKPTCLINNSSYIATTALSHPNEVEHNFPCSLYKDEIKKEIERESKRIKLNDNDDEGNKKIIAPRIFISDDIDSLKCPCDPEIVSNSTCNFFVCKCVEKRAEVTSNNEVVVKEEYKDEYADIPEHKPTYDKMKIIIASSAAVAVLATILMVYLYKRKGNAEKYDKMDEPQDYGKSNSRNDEMLDPEASFWGEEKRASHTTPVLMEKPYY

SEQ ID NO: 3073 - protein, 378 aa, Plasmodium cynomolgi
MKNFNLLVVSSILLVDLFPTNCGHNVHFSRAINLNGVSFNNVDASSLGAAQVRQSASRGRGLGENPKDEEGADKPKKKEEKKVEPKKPRENKLKQPPAGDGAPEGDGAPAAPAGDGAPAAPAGDGAPAAPAGDGAPAAPAGDGAPAAPAGDGAPAAPAGDGAPAAPAGDGAPAAPAGDGAPAAPAGDGAPAGNRAGGQPAAGGNQAGGNRAGGQPAAGGNQAGGNRAGGQPAAGGNQAGGQPAAGGNQAGAQAGGNQAGAQAGGANAGNKKAGEAGGNAGAGQGQNNEAANVPNAKLVKEYLDKIRSTLGVEWSPCSVTCGKGVRMRRKVSAANKKPEELDVNDLETEVCTMDKCAGIFNVVSNSLRLVILLVLALFN

SEQ ID NO: 3074 - protein, 866 aa, Schistosoma japonicum
MMNHDTESHVKISRTIYRGVSPSTTRLESRVRELEDILDLERDARVRAERHAADLSYQVDALSERLDEAGGSTTQTQELLKRREMEINKLRKDLENANASLELAETSMRRRHQTALNELSLEVENLQKQKGKAEKDKSHLIMEVDNVLGQLDGALKAKQSAESKLEGLDSQLNRLKTLTDDLQRQLTELNNAKSRLTSENFELLHINQDYEAQILNYSKAKSSLESQVDDLKRSLDDESRNRFNLQAQLTSLQMDYDNLQAKYDEESEEASNLRNQVSKFNADIAALKSKFERELMSKTEEFEEMKRKLTMRITELEDVAERERLKAVSLEKLKTKLTLEIKDLQSEIESLSLENGELIRRAKSAESLASELQRRVDELTIEVNTLTSQNNQLESENMRLKSLVNDLTDKNNALERENRQMNDQVKELKSSLRDANRRLTDLEALRSQLEAERDNLASALHDAEEALRDMDQKYQASQAALNHLKSEMEQRLRERDEELESLRKSTTRTIEELTVTITEMEVKYKSELSRLKKRYESSIADLEIQLDATNKANANLMKENKNLAQRVKDLETFLDDERRLREAAENNLQITEHKRIQLANEVEELRSAMENLERLRKHAETELEETQSRVSELTIQVNTLSNDKRRLEGDIGVMQADMDDAINAKQAAEDRATRLNNEVLRLADELRQEQENYKHAEALRKQLEIEIREITVKLEEAEAFATREGRRMVQKLQARVRELEAEFDGESRRCKDALAQARKFERQYKELQTQAEDDRRMVLELQDLLDKTQMKMKAYKRQLEEMEEVSQITMNKYRKAQQQIEEAEHRADMAERTVTVRRVGPGGRAVSVARELSVTSNRGMRATSMM

SEQ ID NO: 3075 - protein, 315 aa, Plasmodium falciparum
EALFQEYQCYGSSSNTRVLNELNYDNAGTNLYNELEMNYYGKQENWYSLKKNSRSLGENDDGNNNNGDNGREGKDEDKRDGNNEDNEKLRKPKHKKLKQPADGNPDPNANPNVDPNANPNVDPNANPNVDPNANPNANPNANPNANPNANPNANPNANPNANPNANPNANPNANPNVDPNANPNANPNANPNANPNANPNANPNANPNANPNANPNANPNANPNANPNANPNANPNANPNANPNANPNANPNANPNANPNANPNANPNKNNQGNGQGHNMPNDPNRNVDENANGNNAVKNNNNEEPSDQHIEKYL

SEQ ID NO: 3076 - protein, 178 aa, Onchocerca volvulus
MYHQLILMALIGVIMANVVPFSMSNIPEEYKEFIPEEVKNFYKNLTQEDRQILRELASKHATFTNEDAALEALKNKSDKLYQKAVELRNFVKAKIDSLKPDAKAFVDEIIAKVRSLRPEDGQKLDMEKLKQAARDIIAKYEALNEETKEELKATFPNTTKIITNEKFKRIANSFLQKN

SEQ ID NO: 3077 - protein, 476 aa, Trypanosoma brucei brucei
MPSNQEARLFLAVLVLAQVLPILVDSAAEKGFKQAFWQPLCQVSEELDDQPKGALFTLQAAASKIQKMRDAALRASIYAEINHGTNRAKAAVIVANHYAMKADSGLEALKQTLSSQEVTATATASYLKGRIDEYLNLLLQTKESGTSGCMMDTSGTNTVTKAGGTIGGVPCKLQLSPIQPKRPAATYLGKAGYVGLTRQADAANNFHDNDAECRLASGHNTNGLGKSGQLSAAVTMAAGYVTVANSQTAVTVQALDALQEASGAAHQPWIDAWKAKKALTGAETAEFRNETAGIAGKTGVTKLVEEALLKKKDSEASEIQTELKKYFSGHENEQWTAIEKLISEQPVAQNLVGDNQPTKLGELEGNAKLTTILAYYRMETAGKFEVLTQKHKPAESQQQAAETEGSCNKKDQNECKSPCKWHNDAENKKCTLDKEEAKKVADETAKDGKTGNTNTTGSSNSFVISKTPLWLAVLLF

SEQ ID NO: 3078 - protein, 302 aa, Plasmodium falciparum
MKVIKTLSIINFFIFVTFNIKNESKYSNTFINNAYNMSIRRSMEESKPPTGAVAGSGAGAGSGAGAVAGSGAGAVAGSGAGAVAGSGAGAVAGSGAGAVAGSGAGAVAGSGAGNGANPGADAERSPSTPATTTTTTTTNDAEASTSTSSENRNHNNAETNPKGKGEVQKPNQANKETQNNSNVQQDSQTKSNVPRTQDADTKSPTAQPEQAENSAPTAEQTESPELQSAPENKGTGQHGHMHGSRNNHPQNTSDSQKECTDGNKENCGAATSLLNNSSNIASINKFVVLISATLVLSFAIFI

SEQ ID NO: 3079 - protein, 398 aa, Plasmodium cynomolgi
MKNFNLLAVSSILLVDLFRTQWGHNVHFSKAINLNGVSFNNVDASSLGAAQVRQSASRGRGLGENPKNEEGADKPKKKDEKQVEPKKPRENKLKQPAGNNAAAGEAGNNAAAGEAGNNAAAGEAGNNAAAGEAGNNAAAGEAGNNAAAGEAGNNAAGGAAGNNAAGGEAGNNAAGGAAGNNAAAGEAGNNAAGGEAGNNAAAGEAGNNAAGGAAGNNAAAGEAGNNAAAGAAGNNAAAGAAGNNAAAGEAGAGGAGRAGNNAAAGEAGAGGAGRAGNNAAAGEAGAGGAGGNAGNKKAGDAGQGQNNGGANVPNVKLVKEYLDKIRSTIGVEWSPCSVTCGKGVRMRRKVNAANKKPEELDANDLETEVCTMDKCAGIFNVVSNSLGLVILLVLALFN

SEQ ID NO: 3080 - protein, 287 aa, Plasmodium falciparum
MKVIKTLSIINFFIFVTFNIKNESKYSNTFINNAYNMSIRRSMTESNPPTGASGSAGGSAGGSAGGSAGGSAGGSAGGSAGGSAGGSAGGSAGGSAGGSAGGSAGSGDGNGANPGADAERSPSTPATTTTTTTTNDAEASTSTSSENPNHNNAETNQANKETQNNSNVQQDSQTKSNVPPTQDADTKSPTAQPEQAENSAPTAEQTESPELQSAPENKGTGQHGHMHGSRNNHPQNTSDSQKECTDGNKENCGAATSLLNNSSNIASINKFVVLISATLVLSFAIFI

SEQ ID NO: 3081 - protein, 503 aa, Trypanosoma brucei brucei
MVTKERNAALKIVMLVASALTLHPQQALAQTAGRPLADVVGKTLCTYSKTAKRQAANLAQTLQRASSAAKQSRQAQQLAALALAKLPDYKEAAATLLIYATHKIQDAQASIENWTGENTKLVGQAMYSSGRIDELMLLLEGHREDGANGQDKTCLGAAAGGNTVNEFVKTECDTESGHNIEADNSNIGQAATTLSQESTDPEASGGASCKITANLATDYDSHANELPLLGGLLTIHNAGGFKTGQSLQTAAPTNKLISALKNKGAGVAAKLATVTSAAPTSKQELKTLLASKGERAKLQAANDEYNNWKPGAKPEDFDAHIKKVFGAEDGKDSAYAIALEGISIEAPLGGGQTQNKQLYSMQPKDLMAALIGTIAELQTAAATKPACPGHKQTTTESDALCSKIKDANECNSKHFCSYNGTETDSAKKCKYNATKASASDAPVTQAQTTSRSETPAEKCTGKKKDDCKDGCKWEAETCKDSSILLTKNFALSVVSAALVALLF

SEQ ID NO: 3082 - protein, 274 aa, Plasmodium falciparum
MLEAKLNNASILKKLFECIKDLVNDANVDADESGLKLQALDGNHVSLVSLHLLDSGFSHYRCDRERVLGVNIASLNKVFKLCGANESVVISSKDDEDNLNFVFENNKEDKVTNFSLKLMSIELDSLNIPDCEEGFDAEVELSSKELTNIFRNLSEFSDTVFIEIDSNCIKFTTKGIVGDAEVALKPRDSTSEDDIGVTIKSKKKIKQSFAIKYLNLFSKSNILADVVVLGLSDSRPIEFKYEIKDTSPDSDTLKIGFVKFFLAPKMDDDMDNKD

SEQ ID NO: 3083 - protein, 157 aa, Plasmodium falciparum
MNIRKFIPSLALMLIFFAFANLVLSDANDKAKKPAGKGSPSTLQTPGSSSGASLHAVGPNQGGLSQGLSGKDSADKMPLETQLAIEEIKSLSNMLDKKTTVNRNLIISTAVTNMIMLIILSGIVGFKVKKTKNADDDKGDKDKDKDNTDEGDEGDDS

SEQ ID NO: 3084 - protein, 558 aa, Plasmodium chabaudi
MKEIYYIVILCSLYLINLGNCSEGTDKIISENGDVKFDLIPKENTERSHKLINPWEKFMEKYDIEKVHGSGIRVDLGEDARVENQDYRIPSGKCPVMGKGITIQNSKVSFLTRVATGNQKVREGGLAFPQTDVNISPITIDNLKLMYKDHKEILALNDMSLCAKHASFYVPGTNVNTAYRHPAVYDKSNKTCYILYVAAQENMGPRYCSNEEDNENQPFCFTPEKKDEYKNLSYLTKNLREDWETSCPNKSIQNAKFGVWVDGYCSEYQKKEVHDNKTLLECNQIVFNESASDQPKQYEKHLEDTAKIRRGIVDRNGKLIGEALLPIGSYRADQVKSKGKGYNWANYDKKTKKCYIFNKKPTCLINDKDFVATTALSSLEEGPQESFPCDIYKKKIAEEIKVMNVNRNNNGNDTIKFPRIFISDDKESLNCPCEPTQLTQSTCKFFVCNCVEKRQFISENNEVEIKDEFKSEYESPINQRMLIIIILIATGAILASLLIFYFFKSNKPGDDYDKMGQADTYGKAQSRKDEMLDPEVSFWGEDKRASHTTPVLMEKPYY

SEQ ID NO: 3085 - protein, 412 aa, Plasmodium falciparum
MMRKLAILSVSSFLFVEALFQEYQCYGSSSNTRVLNELNYDNAGTNLYNELEMNYYGKQENWYSLKKNSRSLGENDDGNNNNGDNGREGKDEDKRDGNNEDNEKLRKPKHKKLKQPGDGNPDPNANPNVDPNANPNVDPNANPNVDPNANPNANPNANPNANPNANPNANPNANPNANPNANPNANPNANPNANPNANPNANPNANPNVDPNANPNANPNANPNANPNANPNANPNANPNANPNANPNANPNANPNANPNANPNANPNANPNANPNANPNANPNANPNKNNQGNGQGHNMPNDPNRNVDENANANNAVKNNNNEEPSDKHIEQYLKKIKNSISTEWSPCSVTCGNGIQVRIKPGSANKPKDELDYENDIEKKICKMEKCSSVFNVVNSSIGLIMVLSFLFLN

SEQ ID NO: 3086 - protein, 223 aa, Brugia pahangi; identical to SEQ ID NO: 3059

SEQ ID NO: 3087 - protein, 216 aa, Eimeria tenella
MADLFSGLVGGVVGAVAAADLPAEGERAPRPAPGTAWTCCCSKLQEGARELEGFVQQLSFVAGKLACCLRVGAEQLARCAAEGRLPSSSSSSSCCALLQLEKQDLEQSLEAGKQGAECLLRSSKLALEALLEGARVAATRGLLLVESSKDTVLRSIPHTQEKLAQAYSSFLRGYQGAAAGRSLGYGAPAAAYGQQQQPSSYGAPPASSQQPSGFFW

SEQ ID NO: 3088 - protein, 442 aa, Plasmodium falciparum
MMRKLAILSVSSFLFVEALFQEYQCYGSSSNTRVLNELNYDNAGTNLYNELEMNYYGKQENWYSLKKNSRSLGENDDGDNDNGNNNNGNNNNGDNGREGKDEDKRDGNNEDNEKLRKPKHKKLKQPGDGNPDPNANPNVDPNANPNVDPNANPNANPNANPNANPNANPNANPNANPNANPNANPNANPNANPNANPNANPNANPNANPNVDPNANPNANPNANPNANPNANPNANPNANPNANPNANPNANPNANPNANPNANPNANPNANPNANPNANPNANPNANPNANPNANPNANPNANPNANPNANPNANPNKNNQGNGQGHNMPNDPNRNVDENANANNAVKNNNNEEPSDKHIEQYLKKIQNSLSTEWSPCSVTCGNGIQVRIKPGSADKPKDQLDYENDIEKKICKMEKCSSVFNVVNSSIGLIMVLSFLFLN

SEQ ID NO: 3089 - protein, 713 aa, Giardia intestinalis
MFGRFLLAIVILQLARTACTQEADDGKCKTCGVTIGQDTWCSECNGANYAPVNGQCVDVNAEGPSKTLCPQHSAGKCTQCGGNSFMYKDGCYSSGEGLPGHSLCLSSDGDGVCTEAAPGYFAPVGAANTEQSVIACGDTTGVTIAAGGNTYKGIADCAECSAPDATAGAEAGKVATCTKCGVSKYLKDNVCVDKAQCNSGSTNKFVAVDDSENGNKCVSCSDNLNGGVANCDTCSYDEQSKKIKCTKCTDNNYLKTTSEGTSCVQKDQCKDGFFPKDDSSAGNKCLPCNDSTDGIANCATCALVSGRSGAALVTCSACTDGYKPSADKTTCEAVSNCKTPGCKACSNEGKENEVCTDCDGSTYLTPTSQCIDSCAKIGNYYGATEGAKKLCKECTAANCKTCDDQGQCQACNDGFYKNGDACSPCHESCKTCSAGTASDCTECPTGKALRYGDDGTKGTCGEGCTTGTGAGACKTCGLTIDGASYCSECATTTEYPQNGVCAPKASRATPTCNDSPIQNGVCGTCADNYFKMNGGCYETVKYPGKTVCISAPNGGTCQKAADGYKLDSGTLTVCSEGCKECASSTDCTTCLDGYVKSASACTKCDASCETCNGAATTCKACATGYYKTASGEGACTSCESDSNGVTGIKGCLNCAPPPNNKGSVLCYLIKDSGSTNKSGLSTGAIAGISVAVIVVVGGLIGFLCWWFLCRGKA

SEQ ID NO: 3090 - protein, 427 aa, Plasmodium falciparum
MRISKASNIESTGVSNCKNFNSKNCSKYSLMEVQNKNEKKRSLTSFHAKNITLIFGIIYVALLGVYICASQYKQAADYSFRESRVLAEGKSTSKKNAKTALRKTKQTTLTSADPEGQIMKAWAADPEYRKHLNVLYQILNNTDPNDELETSADPEGQIMKAYAADPEYRKHLNVLYQILNNTDPNDEVESSADPEGQIMKAYAADPEYRKHVNVLYQILNNTDPNDELETSADPEGQIMKAYAADPEYRKHVNVLYQILNHTDSSEVETSADPEGQIMKAYAADPEYRKHVNVLYQILNHTDSSEVETSADPEGQIMKAYAADPEYRKHVNVLYQILNNTDPNDELETSADPEGQIMKAYAADPEYRKHVNVLYQILNNTDPNDELETSADPEGQIMKAYAADPEYRKHVNVLYQILNNTDPNDESS

SEQ ID NO: 3091 - protein, 989 aa, Plasmodium falciparum
MKSYISLFFILCVIFNKNVIKCTGESQTGNTGGGQAGNTVGDQAGSTGGSPQGSTGASQPGSSEPSNPVSSGHSVSTVSVSQTSTSSEKQDTIQVKSALLKDYMGLKVTGPCNENFIMFLVPHIYIDVDTEDTNIELRTTLKETNNAISFESNSGSLEKKKYVKLPSNGTTGEQGSSTGTVRGDTEPISDSSSSSSSSSSSSSSSSSSSSSSSSSSSSSSSSSSSESLPANGPDSPTVKPPRNLQNICETGKNFKLVVYIKENTLIIKWKVYGETKDTTENNKVDVRKYLINEKETPFTSILIHAYKEHNGTNLIESKNYALGSDIPEKCDTLASNCFLSGNFNIEKCFQCALLVEKENKNDVCYKYLSEDIVSNFKEIKAETEDDDEDDYTEYKLTESIDNILVKMFKTNENNDKSELIKLEEVDDSLKLELMNYCSLLKDVDTTGTLDNYGMGNEMDIFNNLKRLLIYHSEENINTLKNKFRNAAVCLKNVDDWIVNKRGLVLPELNYDLEYFNEHLYNDKNSPEDKDNKGKGVVHVDTTLEKEDTLSYDNSDNMFCNKEYCNRLKDENNCISNLQVEDQGNCDTSWIFASKYHLETIRCMKGYEPTKISALYVANCYKGEHKDRCDEGSSPMEFLQIIEDYGFLPAESNYPYNYVKVGEQCPKVEDHWMNLWDNGKILHNKNEPNSLDGKGYTAYESERFHDNMDAFVKIIKTEVMNKGSVIAYIKAENVMGYEFSGKKVQNLCGDDTADHAVNIVGYGNYVNSEGEKKSYWIVRNSWGPYWGDEGYFKVDMYGPTHCHFNFIHSVVIFNVDLPMNNKTTKKESKIYDYYLKASPEFYHNLYFKNFNVGKKNLFSEKEDNENNKKLGNNYIIFGQDTAGSGQSGKESNTALESAGTSNEVSERVHVYHILKHIKDGKIRMGMRKYIDTQDVNKKHSCTRSYAFNPENYEKCVNLCNVNWKTCEEKTSPGLCLSKLDTNNECYFCYV

SEQ ID NO: 3092 - protein, 1073 aa, Plasmodium knowlesi
MEGKKKRPLFFLLVLLLSHKANNVLFERMNGILLLECENEYVKNENGYKLATGHHYMDNDQIEQWLQGTDRSRRVKIEENVKYKYNVEELNTKYEQMKAPRINRILKESTYEAQNVADNNYIDDKANGEHKTDNKTNKGEGARNMVMLDYDISGSGQPDGIIDNVVELGTEDEGNFLENSSKGGDHPYRMNRKERMSNGVINQTFLQNNVMDKCNDKRKRGERDWDCPAEKDICISVRRYQLCMKGLTNLVNNTRTHSHNDITFLKLNLKRKLMYDAAVEGDLLLKKNNYQYNKEFCKDIRWGLGDFGDIIMGTNMEGIGYSQVVENNLRQVFGTDEKAKQDRKQWWNESKEHIWRAMMFSIRSRLKEKFVWICKKDVTLKVEPQIYRWIREWGRDYMSKLPKEQGKLNEKCASKLYYNNMAICMLPLCHDACKSYDQWITRKKKQWDVLSTKFSSVKKTQKIGTENIATAYDILKQELNGFKEATFENEINKRDNLYNHLCPCVVEEARKNTQENVKNVGSGVESKAASSNPITEAVKSSSGEGKVQEDSAHKSVNKGEGKSSTNEADPGSQSGAPASRSVDEKAGVPALSAGQGHDKVPPAEAAATESAVLHSADKTPNTVTEENKEGTQMDGAAGGDGKAPGPTVSSDVPSVGGKDSGPSTSASHALAGENGEVHNGTDTEPKEDGEKADPQKDIEVKGKQDTDDRSQGSLGPHTDERATLGETHMEKDTETAGGSTLTPEQNVSVASDNGNVPGSGNKQNEGATALSGAESLKSNESVHKTIDNTTHGLENKNGGNEKDFQKHDFMNNDMLNDQASSDHTSSDQTSSDHTSSDQTSSDHTSSDHTSSDQTSSDQTSSDQTIDTEGHHRDNVRNPEIKSSEDMSKGDFMRNSNSNELYSHNNLNNRKLNRDQYEHRDVKATREKIILMSEVNKCNNRASVKYCNTIEDRMLSSTCSRERRKNLCCSISDFCLNYFELYSYEFYNCMKKEFEDPSYECFTKGSSTGIVYFATGGAFLIILLLFASWNAASNDYEEEATFDEFVEYSDDIHRTPLMPNDIEHMQQFTPLDYS

SEQ ID NO: 3093 - protein, 743 aa, Plasmodium falciparum
MMNMKIVLFSLLLFVIRWNIISCNKNDKNQGVDMNVLNNYENLFKFVKCEYCNEHTYVKGKKAPSDPQCADIKEECKELLKEKQYTDSVTYLMDGFKSANNSANNGKKNNAEEMKNLVNFLQSHKKLIKALKKNIESIQNKKHLIYKNKSYNPLLLSCVKKMNMLKENVDYIQKNQNLFKELMNQKATYSFVNTKKKIISLKSQGHKKETSQNQNENNDNQKYQEVNDEDDVNDEEDTNDDEDTNDEEDTNDDEDTNDDEDTNDEEDTNDEEDHENNNATAYELGIVPVNDVLNVNMKNMITGNNFMDVVKNTLAQSGGLGSNDLINFLNQGKEIGENLLNITKMNLGDKNNLESFPLDELNMLKDNLINYEFILDNLKTSVLNKLKDLLLRLLYKAYVSYKKRKAQEKGLPEPTVTNEEYVEELKKGILDMGIKLLFSKVKSLLKKLKNKIFPKKKEDNQAVDTKSMEEPKVKAQPALRGVEPTEDSNIMNSINNVMDEIDFFEKELIENNNTPNVVPPTQSKKKNKNETVSGMDENFDNHPENYFKEEYYYDENDDMEVKVKKIGVTLKKFEPLKNGNVSETIKLIHLGNKDKKHIEAINNDIQIIKQELQAIYNELMNYTNGNKNIQQIFQQNILENDVLNQETEEEMEKQVEAITKQIEAEVDALAPKNKEEEEKEKEKEEKEKEEKEKEKEEKEKEEKEKEEKEKEEKEEEKKEKEEEQEEEEEEEIVPENLTTEESK

SEQ ID NO: 3094 - protein, 401 aa, Plasmodium cynomolgi
MKNFNLLAVSSILLVDLFPTHCGHNVDFSRGINLNGVSFNNVDASSHGAEQVRQSASRGRGLGENPKDEGADKPKKKDEKQVEPKKPRENKLKQPREDGAAAAGGGGNDGAAAAGGGGNDGAAAAGGGGNDGAAAAGGGGNDGAAAAGGGGNDGAAAAGGGGNDGAAAAGGGGNDGAAAAGGGGNDGAAAAGGGGNDGAAAAGGGGNDGAAAAGGGGNGGAAAAGGGGNDGAAAAGGGGNDGAAAAGGGNGGAAAGGGGNGGAAAGGGNGGAAAGGGNNARAGDQQPPAGGNKKAGEAGGNAGAGQAQNNEAANVPNAKLVKEYLDKIRSTLGVEWSPCTVTCGKGVRMRRKVSAANKKPEELDANDLETEVCTMDKCAGIFNVVSNSLRLVILLVLALFN

SEQ ID NO: 3095 - protein, 369 aa, Plasmodium falciparum
MAHCTEYMNAPKKLPADVAEELATTAQKLVQAGKGILAADESTQTIKKRFDNIKLENTIENRASYRDLLFGTKGLGKFISGAILFEETLFQKNEAGVPMVNLLHNENIIPGIKVDKGLVNIPCTDEEKSTQGLDGLAERCKEYYKAGARFAKWRTVLVIDTAKGKPTDLSIHETAWGLARYASICQQNRLVPIVEPEILADGPHSIEVCAVVTQKVLSCVFKALQENGVLLEGALLKPNMVTAGYECTAKTTTQDVGFLTVRTLRRTVPPALPGVVFLSGGQSEEEASVNLNSINALGPHPWALTFSYGRALQASVLNTWQGKKENVAKAREVLLQRAEANSLATYGKYKGGAGGENAGASLYEKKYVY

SEQ ID NO: 3096 - protein, 274 aa, Plasmodium falciparum; identical to SEQ ID NO: 3082

SEQ ID NO: 3097 - protein, 264 aa, Leishmania major
MALGKNKRISKGGKRGKRGKAQETMARKEWYDVVAPANFEKRQFAKTICNKTQGTRIAADVLRGRVFEANLADLNQSAGEEEAYRKVRFTVQEVQGRNLLTQFHSMEVTTDKMASLLRKWCTTMETTVEVKTADGYTMRLFVVAFTKPQANQQSRNCYAKQRLVKWLRMRITKMIKRRLSKVQIKEAVSLLTRNVLSDALVRRCNPILPLRELRIRKVRVVRTPKFDAQALLSAHGTIPASVEADQREVEEAVEAAPAAEKAAE

SEQ ID NO: 3098 - protein, 622 aa, Plasmodium falciparum
MRKLYCVLLLSAFEFTYMINFGRGQNYWEHPYQKSDVYHPINEHREHPKEYQYPLHQEHTYQQEDSGEDENTLQHAYPIDHEGAEPAPQEQNLFSSIEIVERSNYMGNPWTEYMAKYDIEEVHGSGIRVDLGEDAEVAGTQYRLPSGKCPVFGKGIIIENSNTTFLTPVATGNQYLKDGGFAFPPTEPLMSPMTLDEMRHFYKDNKYVKNLDELTLCSRHAGNMIPDNDKNSNYKYPAVYDDKDKKCHILYIAAQENNGPRYCNKDESKRNSMFCFRPAKDISFQNYTYLSKNVVDNWEKVCPRKNLQNAKFGLWVDGNCEDIPHVNEFSAIDLFECNKLVFELSASDQPKQYEQHLTDYEKIKEGFKNKNASMIKSAFLPTGAFKADRYKSHGKGYNWGNYNTETQKCEIFNVKPTCLINNSSYIATTALSHPIEVEHNFPCSLYKNEIMKEIERESKRIKLNDNDDEGNKKIIAPRIFISDDKDSLKCPCDPEIVSNSTCNFFVCKCVERRAEVTSNNEVVVKEEYKDEYADIPEHKPTYDKMKIIIASSAAVAVLATILMVYLYKRKGNAEKYDKMDEPQHYGKSNSRNDEMLDPEASFWGEEKRASHTTPVLMEKPYY

SEQ ID NO: 3099 - protein, 388 aa, Plasmodium reichenowi
MMRKLAILSVSSFLFVEALFQEYQCYGSSSNTRVLNELNYDNAGTNLYNELEMNYYGKQENWYSLKKNSRSLGENDDADNGDADNGDEGIDENRRHRNKEGKEKLKKPKHNKLKQPGNDNVDPNANPNVDPNANPNVDPNANPNVDPNANPNVDPNANPNVNPNANPNVDPNANPNVNPNANPNVNPNANPNVNPNANPNANPNANPNANPNANPNANPNANPNANPNANPNANPNANPNANPNANPNANPNANPNANPNANPNRNNEANGQGHNKPNDQNRNVNENANANNAGRNNNNEEPSDKHIEEFLKQIQNNLSTEWSPCSVTCGNGIQVRIKPGSAGKPKDQLDYENDLEKKICKMEKCSSVFNVVNSSIGLIMVLSFLFLN

SEQ ID NO: 3100 - protein, 262 aa, Toxocara canis
MSVVHKACLIALLFVSSGVAQQCMDSASDCAANAGSCFTRPVSQVLQNRCQRTCNTCDCRDEANNCAASINLCQNPTFEPLVRDRCQKTCGLCAGCGFISSGIVPLVVTSAPSRRVSVTFANNVQVNCGNTLTTAQVANQPTVTWEAQPNDRYTLIMVDPDFPSAANGQQGQRLHWWVINIPGNNIAGGTTLAAFQPSTPAANTGVHRYVFLVYRQPAAINSPLLNNLVVQDSERPGFGTTAFATQFNLGSPYAGNFYRSQA

SEQ ID NO: 3101 - protein, 312 aa, Leishmania major
MNYEGHLKGHRGWVTSLACPQQAGSYIKVVSTSRDGTVISWKANPDRHSVDSDYGLPNHRLEGHTGFVSCVSLAHATDYALTASWDRSIRMWDLRNGQCQRKFLKHTKDVLAVAFSPDDRLIVSAGRDNVIRVWNVAGECMHEFLRDGHEDWVSSICFSPSLEHPIVVSGSWDNTIKVWNVNGGKCERTLKGHSNYVSTVTVSPDGSLCASGGKDGAALLWDLSTGEQLFKINVESPINQIGFSPNRFWMCVATERSLSVYDLESKAVIAELTPDGAKPSECISIAWSADGNTLYSGHKDNLIRVWSISDAE

SEQ ID NO: 3102 - protein, 253 aa, Eimeria tenella
MARLSFVSLLSLSLLFGQQAVRAQDYPTAVTLDCKEAMNKLRKAAGLPAFEDAVGDTFVLPAYSHEESRAAPVAETLWKTEICPKVLGGGRSRNVTEAVKLTGNFAYYPVTDGKKECSDAVEYWKGGLSQFNDTIPPTFQALNDPVVYNDRAVSFVALYNPKTSPVVSCVLLQCPNAGVGGRRLAAGTTDAVICLTNPAPLEARSQPFDDEQWKKIVDSLSLSEEEEEKGGVSPVVPSVALISAAVISAFALF

SEQ ID NO: 3103 - protein, 827 aa, Plasmodium yoelii yoelii
MKLLGNSKYIFVVLLLCISVFLNGQETLDEIKYSEEVCTEQIDIHILLDGSGSIGYSNWKAHVIPMLNTLVDNLNISNDEINVSLTLFSTNSRELIKLKGYGSTSKDSLRFILAHLQNNYSPNGNTNLTSALLVVDTLINERMYRPDAIQLAIILTDGIPNDLPRSTAVVHQLKRKHVNVAIIGVGAGVNNEYNRILVGCDRYAPCPYYSSGSWNEAQNMIKPFLTKVCQEVERIAHCGKWEEWSECSTTCDEGRKIRRRQILHPGCVSEMTTPCKVRDCPQIPIPPVIPNKIPEKPSNPEEPVNPNDPNDPNNPNNPNNPNNPNNPNNPNNPNNPNNPNNPNNPNNPNNPNNPNNPNNPNNPNNPNNPNNPNNPNNPNNPNDPSNPNNPNPKKRNPKRRNPNKPKPNKPNPNKPNPNEPSNPNKPNPNEPSNPNKPNPNEPSNPNKPNPNEPSNPNKPNPNEPLNPNEPSNPNEPSNPNAPSNPNEPSNPNEPSNPNEPSNPNEPSNPNEPSNPKKPSNPNEPSNPNEPLNPNEPSNPNEPSNPNEPSNPEEPSNPKEPSNPNEPSNPEEPNPEEPSNPKEPSNPEEPINPEELNPKEPSNPEESNPKEPINPEESNPKEPINPEDNENPLIIQDEPIEPRNDSNVIPILPIIPQKGNNIPSNLPENPSDSEVEYPRPNDNGENSNNTMKSKKNIPNEPIPSPGDNPYKGHEERIPKPHRSNDDYVYDNNVNKNNKDEPEIPNNEYEEDKNKNQSKSNNGYKIAGGIIGGLAILGCAGVGYNFIAGSSAAGLAGAEPAPFEDVIPDDDKDIVENEQFKLPEDNDWN

SEQ ID NO: 3104 - protein, 467 aa, Trypanosoma brucei rhodesiense
SEPTMSTRVQQATSCVLLIIGCTNYAASKQQTENNAVCDTPCKCLGRLAVQKAYLEGALEHARQSIKAFASSSRQHTIAAGATNTKLSGHHPNQGRRGRRRSSSARPNNSKGNSPSKRAGGAVRGETPASGRLKAAKLLKSSNYETATFTPTEMTIQNRRACEQVDESKEYRFDELNFDKEQGIPTPALTLEISMGCQKNPGDTGGACDGTNADDGVVTKLTFTTAAPVAETSPLVAGAYKKTSKASLSISNRTEEGRVANSKAAHEAAKRLMAIKQPSDLSTYTDDSSFALLVGQLAMKPPLGAELTPALRDQVNKFITDNYGANEGDFRSKFLAKTEQAAVFYLDGKSKKTKKISELESKSELVTASGYAFFKGIHTEQAEKVENPRSQGNPETAENKKEGGNTAKPFCSTIQNQTECEGVKGTPPTGKAKVCGWIEGKCQDSSFLLSKQFALSVVSAAFAALLF

SEQ ID NO: 3105 - protein, 138 aa, Sarcocystis muris
AGPQLDVSCFAHDKNIGSRTEQLSVVHVASAQDCMKECQALPTCSHFTYNKNSKKCHLKAGAPEFYTYTGDMTGPRSCEHNCSDACWMDGNNPLAVWDYSGQPPALCWAACMGTPGCDLYTFQGMTCKLYSQTSSKRA

SEQ ID NO: 3106 - protein, 1304 aa, Plasmodium falciparum
MSCMNYASRLSKNEYKGPLGEEEFFEDTEEEKKKVKELIEKIRSSEYIVVHSGAGISTSSGLQDFRGPTGIWTNEHLNELKNKKKRNHDFKDNKRKLKSNDINCKNTSDMCSPSFFHKEKKENTLNIVKRERYYNEDNVDMNACNERVVHPNHVYVNHEDDNNNNNNNNNNDNNLYNNVYNSVGSNDHTNKESILIKKENNSENVRKDIHDKVNTKNVKKIDVKETNNLDPENYVIFGKRKKKVIELHLALPSKTHIMINELINKNIIKFMITQNIDSLHHRCGKHFSKTAEIHGNIFTERCDFCGRRYLRDYLISTISFKPTGSLCFLCSFPPIGVCTDVLLDWNNSYEEFFHLNSIKHSQIADFHFCLGSSFYIVPASSYPSKKKYANANSYSCVINYQKSFLSKEVNLNIHSNVNNISDIIIKEFSLNPLSIRSARITIVRCPINTLDVICDKLISIHNIKMKHKSMRQHSIDYSQMGNKDEKYNNEKYVKRNMTECLYYNKEGECYEKRKYKLMEKKFFPNNQQNEFIPNRINIFEQKFHEHNNNNNNNNNNNNNNNNNNNNNNNNNNNNNNNNNNSSSSIDSSCSINSNYHISKNINPDFSFVENQSNIYENYKEQTFILICPMIINIKTVRLESFHKVYIKLLDDIKGLWFIKTNFSCILEVELWYHSFILLKLDFNKSDPFIQLNAWNVNVAYTYGDDIDDFDYFKNDENIKKPFNLYKNKYISNMRREGHVNNLYTLDNEKVKSNTSNNNNNNNNNNNNNNNNNNNNNNNNNNNNNNNNNNNNNNNNNDNNNNNISDHNIYDDHNNNNNKNHNNYDKDNSNESYYCSEILNEHVHVGYNPNNYEPNCKVYILAYLDNLRTRNINNNVNNNNFSRFNLTQSCKLLYNIYCVLNKDNEQKKNSTIKETYDKLDYFIKNFDFNRDSCLYTNNFINMLIQNERHGNQSRYKFRERRKRLLNDYSSCSSDDDQSGKNIFIFYNLYMNQYKKKEDNEINDIYKKYDVHEKNIYDESKQYVHKVRVRTDLINHKSVYKILKNNYLVNINNMKLMEKKNNSEKLFLINDKDNNSLLSINNKENFNCIPSRQNNVKKNSEYMHEEENNKTNSNENIARLNNNDFIQVMETEKQKKYNSFDKYNSDRSSINDTFDEIKYNKNNDNNNDDNNYDDNKNDDDNNNDDNNNNDDNNNNDDNNNNDDNNNGYIYSPVLFINKKFKLGELVYKIPKYVKPQKIYTPYKKISRNKKYSNTLQKDRYEKWKMLYEELINNENKTYIIDSVLYKEISYLPYWILNYVNDLFECM

SEQ ID NO: 3107 - protein, 206 aa, Schistosoma japonicum [sequence omitted]

SEQ ID NO: 3108 - protein, 339 aa, Plasmodium berghei [sequence omitted]

SEQ ID NO: 3109 - protein, 622 aa, Plasmodium falciparum
MRKLYCVLLLSAFEFTYMINFGRGQNYWEHPYQNSNVYHPINEHREHPKEYQYPLHQEHTYQQEDSGEDENTLQHAYPIDHEGAEPAPQEQNLFSSIEIVERSNYMGNPWTEYMAKYDIEEVHGSGIRVDLGEDAEVAGTQYRLPSGKCPVFGKGIIIENSNTTFLKPVATGNQDLKDGGFAFPPTEPLISPMTLNGMRDFYKNNEYVKNLDELTLCSRHAGNMNPDKDENSNYKYPAVYDDKDKKCHILYIAAQENNGPRYCNKDESKRNSMFCFRPAKDKSFQNYTYLSKNVVDNWEKVCPRKNLENAKFGLWVDGNCEDIPHVNEFSANDLFECNKLVFELSASDQPKQYEQHLTDYEKIKEGFKNKNASMIKSAFLPTGAFKADRYKSHGKGYNWGNYNRKTHKCEIFNVKPTCLINNSSYIATTALSHPIEVENNFPCSLYKNEIMKEIERESKRIKLNDNDDEGNKKIIAPRIFISDDKDSLKCPCDPEMVSNSTCRFFVCKCVERRAEVTSNNEVVVKEEYKDEYADIPEHKPTYDNMKIIIASSAAVAVLATILMVYLYKRKGNAEKYDKMDQPQDYGKSTSRNDEMLDPEASFWGEEKRASHTTPVLMEKPYY

SEQ ID NO: 3110 - protein, 184 aa, Plasmodium falciparum
MDKSKSSIEKELNRIKQDVSLSAFSILFSEMVQYCLYKSKRGYRIEDCLHEMGLRVGYKLNEYLTYKNKVKRSINIINILTFISKHVWKYLFQHSSDLLKSQDSIYEYMICDKNILLNKFINVPKDYGNINCAAFAAGIVEGFLCSSEFQADVTAHTIHEGDDNYNTTIFIKFYPEVVEREKNH

SEQ ID NO: 3111 - protein, 183 aa, Babesia bovis
MEAQSATETQKNLKTLMELIKTKRPFKSSDFDTLNLDYLSGQSNEELFKLLIDAINGMKENVAKVNEYLTEEGDHSLSGDELLKFVYKELVYDDESEFDKEKLQKLYKTFSEDSNAFATLQSYIQYLQPEENSQRWIQVHEPVKHRRRLNHNPALRVASPTEQSRCPISRRVVWIPSSVLNPQ

SEQ ID NO: 3112 - protein, 1479 aa, Toxoplasma gondii
MTKRAGLPLGRAFLVLILLSAADSLFFSSFPRSALQLFSSVLFTDAAEPDSDATPGLRPQPSPRTFRPTGYQRIEVKTVDEELPEDLKVYTASTRGSSSRTFEVRNAGGRQEGFTLSVLTAGGPLPHGSWSWSGTPPEVQTTGGSQISFGWVPDTETPSLPERNLLQLKRMLRDEGLIEAVQLRAAEKGCPVAVLHNLRQLPVNFREVLHEEYESRSNPAKMYEVANSYVQQRGSDAARWSVSQSVELSLLEMHATSTTDPRGSSAVPSFLETGPQVRVAMTDAVPSGIRVYATPPAPRPVPVQSNQTEKERSPTSKRLVGMQLGLYLICKLAALFGHPTLFLNPYYTEQQLLEAVAQALGIAPPHRGDFENEGNEAQATANQHNGSADQLLAAIEIFRLGPNPYTIGHVLTLMIAYLDYESFFGASPSKPFHSWVSLAASAGNNTGFAMLDEMCDNHRGPKRRGQKHWYQTGGARKHKNRDMLPLHRQLCDALELVLNGVQQIQIDLMDELGKYKTGVEPLVDPATNSARIHTRTCRGLSPVCDYEATILAPVRALEPHEQQDSLRTKKAFNLVTGYGSGHVGQITGSIAEPFSHSWRTRWGKVVADPTAYGEIFERTLWFDDRELMAKSSGALFRQYDRIAKDSMSFGVFMNVENGLLKKDMRSKLEAYISQRKSFVEKRQQSRFAKLRKKIPENDPYALRAAIFLALNSRTFCAQPTSFLSSFRTFLTNQYHKLSQGRNLPRSQRSLMAFMRTGQVKFFQEWCSFDPLAVNALFLFRFAVSGTDPAALHDRQHTRVSRNKKTMRILNSKWTPAVLKKLMRKVNHKHMAREAKALLLRSLDPTVLSSIVTAFDFITHTQANLEVNQNAFMYHEVRAREVSRQSAAEKGSHRLHERGLVRETDDMIKRWAEHGIPGDIKRRLARGEKLPEGMSFGGIPIPNLTNWDAQLNSKWLEAYNAYLRHPYGRAALNARDPVALLVKDSRDRLQAEAEGTIFLGRIAKRVHQSKNLLRRAGRALKTFFLSLLRENERSEYAVWFGVKVDMRQVIQTCRQINSVAEVVKNDRLYDFITDGWMELVKDVVAGYTKASVRVPGFDTISAANEQLRKEGVAAATARNQGFLSIHYDYANLPEEERKKEFQRSMCMEQCEALWKLVMAFVMPNLQNPKKLKGYEKDFSGAKEIEKLNSPHHVNAFRFSLSVQIDFFDNMLDKTSKKNLKAMKFGASTWFTYAMKLAGQVNSEMGNPNLGTALYMQAAYYGNYIRKWMEQRRKSRKQAIIGVLTLGMMGLYALLNVADIVQHMEDIGGAPPVSCVTNEILGVTCAPQAIAKATTSAARVATQDFLKVGLFAGMAPYLMLPMAVVSVWNILKSEIKVLLQFEMALKHTFTRLKRWLAAPFKNWWAKRGRLKDALFRRASQTYRKTEQETKQPPRPRNLHNPSSWGDTELDSLGVPPEPFVQDFEIKYTTPVFPMSAPLIKA

SEQ ID NO: 3113 - protein, 386 aa, Plasmodium simium
MKNFILLAVSSILLVDLFPTHCGHNVDLSKAINLNGVNFNNVDASSLGAAHVGQSASRGRGLGENPDDEEGDAKKKKDGKKAEPKNPRENKLKQPGDRADGQPAGDRADGQPAGDRADGQPAGDRADGQPAGDRADGQPAGDRAAGQPAGDRADGQPAGDRADGQPAGDRAAGQPAGDRAAGQPAGDRADGQPAGDRADGQPAGDRADGQPAGDRAAGQPAGDRAAGQPAGDRAAGQPAGDRAAGQPAGDRAAGQPAGDRAAGQPAGDRAAGQPAGNGAGGQAAGGNAGGQGQNNEGANAPNEKSVKEYLDKVRATVGTEWTPCSVTCGVGVRVRRRVNAANKKPEDLTLNDLETDVCTMDKCAGIFNVVSNSLGLVILLVLALFN

SEQ ID NO: 3114 - protein, 563 aa, Plasmodium knowlesi
MNKIYYILFLSAQCLVHMGKCERNQKTTRLTRSANNASLEKGPIIERSIRMSNPWKAFMEKYDLERAHNSGIRIDLGEDAEVGNSKYRIPAGKCPVFGKGIVIENSNVSFLTPVATGAQRLKEGGFAFPNADDHISPITIANLKERYKENADLMKLNDIALCKTHAASFVIAEDQNTSYRHPAVYDEKNKTCYMLYLSAQENMGPRYCSPDSQNKDAMFCFKPDKNENFDNLVYLSKNVSNDWENKCPRKNLGNAKFGLWVDGNCEEIPYVNEVEARSLRECNRIVFEASASDQPRQYEEELTDYEKIQEGFRQNNRDMIKSAFLPVGAFNSDNFKSKGRGYNWANFDSVNNKCYIFNTKPTCLINDKNFFATTALSHPQEVDNEFPCSIYKDEIEREIKKQSRNMNLYSVDKERIVLPRIFISTDKESIKCPCEPEHISNSTCNFYVCNCVEKRAEIKENNEVIIKEEFKEDYENPDGKHKKKMLLIIIGVTGAVCVVAVASLFYFRKKAQDDKYDKMDQAEAYGKTANTRKDEMLDPEASFWGEDKRASHTTPVLMEKPYY

SEQ ID NO: 3115 - protein, 312 aa, Leishmania chagasi; identical to SEQ ID NO: 3058

SEQ ID NO: 3116 - protein, 347 aa, Plasmodium berghei
MKKCTILVVASLLLVNSLLPGYGQNKSIQAQRNLNELCYNEGNDNKLYHVLNSKNGKIYIRNTVNRLLADAPEGKKNEKKNKIERNNKLKQPPPPPNPNDPPPPNPNDPPPPNPNDPPPPNPNDPPPPNPNDPPPPNANDPPPPNANDPAPPNANDPAPPNANDPAPPNANDPPPPNANDPPPPNPNDPAPPNANDPPPPNPNDPAPPQGNNNPQPQPRPQPQPQPQPQPQPQPQPQPRPQPQPQPGGNNNNKNNNNDDSYIPSAEKILEFVKQIRDSITEEWSQCNVTCGSGIRVRKRKGSNKKAEDLTLEDIDTEICKMDKCSSIFNIVSNSLGFVILLVLVFFN

SEQ ID NO: 3117 - protein, 253 aa, Homo sapiens; identical to SEQ ID NO: 253

SEQ ID NO: 3118 - protein, 770 aa, Homo sapiens
MLPGLALLLLAAWTARALEVPTDGNAGLLAEPQIAMFCGRLNMHMNVQNGKWDSDPSGTKTCIDTKEGILQYCQEVYPELQITNVVEANQPVTIQNWCKRGRKQCKTHPHFVIPYRCLVGEFVSDALLVPDKCKFLHQERMDVCETHLHWHTVAKETCSEKSTNLHDYGMLLPCGIDKFRGVEFVCCPLAEESDNVDSADAEEDDSDVWWGGADTDYADGSEDKVVEVAEEEEVAEVEEEEADDDEDDEDGDEVEEEAEEPYEEATERTTSIATTTTTTTESVEEVVREVCSEQAETGPCRAMISRWYFDVTEGKCAPFFYGGCGGNRNNFDTEEYCMAVCGSAMSQSLLKTTQEPLARDPVKLPTTAASTPDAVDKYLETPGDENEHAHFQKAKERLEAKHRERMSQVMREWEEAERQAKNLPKADKKAVIQHFQEKVESLEQEAANERQQLVETHMARVEAMLNDRRRLALENYITALQAVPPRPRHVFNMLKKYVRAEQKDRQHTLKHFEHVRMVDPKKAAQIRSQVMTHLRVIYERMNQSLSLLYNVPAVAEEIQDEVDELLQKEQNYSDDVLANMISEPRISYGNDALMPSLTETKTTVELLPVNGEFSLDDLQPWHSFGADSVPANTENEVEPVDARPAADRGLTTRPGSGLTNIKTEEISEVKMDAEFRHDSGYEVHHQKLVFFAEDVGSNKGAIIGLMVGGVVIATVIVITLVMLKKKQYTSIHHGVVEVDAAVTPEERHLSKMQQNGYENPTYKFFEQMQN

SEQ ID NO: 3119 - protein, 758 aa, Homo sapiens
MAEPRQEFEVMEDHAGTYGLGDRKDQGGYTMHQDQEGDTDAGLKESPLQTPTEDGSEEPGSETSDAKSTPTAEDVTAPLVDEGAPGKQAAAQPHTEIPEGTTAEEAGIGDTPSLEDEAAGHVTQEPESGKVVQEGFLREPGPPGLSHQLMSGMPGAPLLPEGPREATRQPSGTGPEDTEGGRHAPELLKHQLLGDLHQEGPPLKGAGGKERPGSKEEVDEDRDVDESSPQDSPPSKASPAQDGRPPQTAAREATSIPGFPAEGAIPLPVDFLSKVSTEIPASEPDGPSVGRAKGQDAPLEFTFHVEITPNVQKEQAHSEEHLGRAAFPGAPGEGPEARGPSLGEDTKEADLPEPSEKQPAAAPRGKPVSRVPQLKARMVSKSKDGTGSDDKKAKTSTRSSAKTLKNRPCLSPKHPTPGSSDPLIQPSSPAVCPEPPSSPKYVSSVTSRTGSSGAKEMKLKGADGKTKIATPRGAAPPGQKGQANATRIPAKTPPAPKTPPSSGEPPKSGDRSGYSSPGSPGTPGSRSRTPSLPTPPTREPKKVAVVRTPPKSPSSAKSRLQTAPVPMPDLKNVKSKIGSTENLKHQPGGGKVQIINKKLDLSNVQSKCGSKDNIKHVPGGGSVQIVYKPVDLSKVTSKCGSLGNIHHKPGGGQVEVKSEKLDFKDRVQSKIGSLDNITHVPGGGNKKIETHKLTFRENAKAKTDHGAEIVYKSPVVSGDTSPRHLSNVSSTGSIDMVDSPQLATLADEVSASLAKQGL

SEQ ID NO: 3120 - protein, 140 aa, Homo sapiens
MDVFMKGLSKAKEGVVAAAEKTKQGVAEAAGKTKEGVLYVGSKTKEGVVHGVATVAEKTKEQVTNVGGAVVTGVTAVAQKTVEGAGSIAAATGFVKKDQLGKNEEGAPQEGILEDMPVDPDNEAYEMPSEEGYQDYEPEA

SEQ ID NO: 3121 - protein, 526 aa, Homo sapiens
MASNDYTQQATQSYGAYPTQPGQGYSQQSSQPYGQQSYSGYSQSTDTSGYGQSSYSSYGQSQNTGYGTQSTPQGYGSTGGYGSSQSSQSSYGQQSSYPGYGQQPAPSSTSGSYGSSSQSSSYGQPQSGSYSQQPSYGGQQQSYGQQQSYNPPQGYGQQNQYNSSSGGGGGGGGGGNYGQDQSSMSSGGGSGGGYGNQDQSGGGGSGGYGQQDRGGRGRGGSGGGGGGGGGGYNRSSGGYEPRGRGGGRGGRGGMGGSDRGGFNKFGGPRDQGSRHDSEQDNSDNNTIFVQGLGENVTIESVADYFKQIGIIKTNKKTGQPMINLYTDRETGKLKGEATVSFDDPPSAKAAIDWFDGKEFSGNPIKVSFATRRADFNRGGGNGRGGRGRGGPMGRGGYGGGGSGGGGRGGFPSGGGGGGGQQRAGDWKCPNPTCENMNFSWRNECNQCKAPKPDGPGGGPGGSHMGGNYGDDRRGGRGGYDRGGYRGRGGDRGGFRGGRGGGDRGGFGPGKMDSRGEHRQDRRERPY

SEQ ID NO: 3122 - protein, 154 aa, Homo sapiens [sequence omitted]

SEQ ID NO: 3123 - protein, 414 aa, Homo sapiens
MSEYIRVTEDENDEPIEIPSEDDGTVLLSTVTAQFPGACGLRYRNPVSQCMRGVRLVEGILHAPDAGWGNLVYVVNYPKDNKRKMDETDASSAVKVKRAVQKTSDLIVLGLPWKTTEQDLKEYFSTFGEVLMVQVKKDLKTGHSKGFGFVRFTEYETQVKVMSQRHMIDGRWCDCKLPNSKQSQDEPLRSRKVFVGRCTEDMTEDELREFFSQYGDVMDVFIPKPFRAFAFVTFADDQIAQSLCGEDLIIKGISVHISNAEPKHNSNRQLERSGRFGGNPGGFGNQGGFGNSRGGGAGLGNNQGSNMGGGMNFGAFSINPAMMAAAQAALQSSWGMMGMLASQQNQSGPSGNNQNQGNMQREPNQAFGSGNNSYSGSNSGAAIGWGSASNAGSGSGFNGGFGSSMDSKSSGWGM

SEQ ID NO: 3124 - protein, 481 aa, Homo sapiens
MSTLCPPPSPAVAKTEIALSGKSPLLAATFAYWDNILGPRVRHIWAPKTEQVLLSDGEITFLANHTLNGEILRNAESGAIDVKFFVLSEKGVIIVSLIFDGNWNGDRSTYGLSIILPQTELSFYLPLHRVCVDRLTHIIRKGRIWMHKERQENVQKIILEGTERMEDQGQSIIPMLTGEVIPVMELLSSMKSHSVPEEIDIADTVLNDDDIGDSCHEGFLLNAISSHLQTCGCSVVVGSSAEKVNKIVRTLCLFLTPAERKCSRLCEAESSFKYESGLFVQGLLKDSTGSFVLPFRQVMYAPYPTTHIDVDVNTVKQMPPCHEHIYNQRRYMRSELTAFWRATSEEDMAQDTIIYTDESFTPDLNIFQDVLHRDTLVKAFLDQVFQLKPGLSLRSTFLAQFLLVLHRKALTLIKYIEDDTQKGKKPFKSLRNLKIDLDLTAEGDLNIIMALAEKIKPGLHSFIFGRPFYTSVQERDVLMTF

SEQ ID NO: 3125 - protein, 624 aa, Homo sapiens
MAENGESSGPPRPSRGPAAAQGSAAAPAEPKIIKVTVKTPKEKEEFAVPENSSVQQFKEAISKRFKSQTDQLVLIFAGKILKDQDTLIQHGIHDGLTVHLVIKSQNRPQGQSTQPSNAAGTNTTSASTPRSNSTPISTNSNPFGLGSLGGLAGLSSLGLSSTNFSELQSQMQQQLMASPEMMIQIMENPFVQSMLSNPDLMRQLIMANPQMQQLIQRNPEISHLLNNPDIMRQTLEIARNPAMMQEMMRNQDLALSNLESIPGGYNALRRMYTDIQEPMLNAAQEQFGGNPFASVGSSSSSGEGTQPSRTENRDPLPNPWAPPPATQSSATTSTTTSTGSGSGNSSSNATGNTVAAANYVASIFSTPGMQSLLQQITENPQLIQNMLSAPYMRSMMQSLSQNPDLAAQMMLNSPLFTANPQLQEQMRPQLPAFLQQMQNPDTLSAMSNPRAMQALMQIQQGLQTLATEAPGLIPSFTPGVGVGVLGTAIGPVGPVTPIGPIGPIVPFTPIGPIGPIGPTGPAAPPGSTGSGGPTGPTVSSAAPSETTSPTSESGPNQQFIQQMVQALAGANAPQLPNPEVRFQQQLEQLNAMGFLNREANLQALIATGGDINAAIERLLGSQPS

SEQ ID NO: 3126 - protein, 3142 aa, Homo sapiens
MATLEKLMKAFESLKSFQQQQQQQQQQQQQQQQQQQQQPPPPPPPPPPPQLPQPPPQAQPLLPQPQPPPPPPPPPPGPAVAEEPLHRPKKELSATKKDRVNHCLTICENIVAQSVRNSPEFQKLLGIAMELFLLCSDDAESDVRMVADECLNKVIKALMDSNLPRLQLELYKEIKKNGAPRSLRAALWRFAELAHLVRPQKCRPYLVNLLPCLTRTSKRPEESVQETLAAAVPKIMASFGNFANDNEIKVLLKAFIANLKSSSPTIRRTAAGSAVSICQHSRRTQYFYSWLLNVLLGLLVPVEDEHSTLLILGVLLTLRYLVPLLQQQVKDTSLKGSFGVTRKEMEVSPSAEQLVQVYELTLHHTQHQDHNVVTGALELLQQLFRTPPPELLQTLTAVGGIGQLTAAKEESGGRSRSGSIVELIAGGGSSCSPVLSRKQKGKVLLGEEEALEDDSESRSDVSSSALTASVKDEISGELAASSGVSTPGSAGHDIITEQPRSQHTLQADSVDLASCDLTSSATDGDEEDILSHSSSQVSAVPSDPAMDLNDGTQASSPISDSSQTTTEGPDSAVTPSDSSEIVLDGTDNQYLGLQIGQPQDEDEEATGILPDEASEAFRNSSMALQQAHLLKNMSHCRQPSDSSVDKFVLRDEATEPGDQENKPCRIKGDIGQSTDDDSAPLVHCVRLLSASFLLTGGKNVLVPDRDVRVSVKALALSCVGAAVALHPESFFSKLYKVPLDTTEYPEEQYVSDILNYIDHGDPQVRGATAILCGTLICSILSRSRFHVGDWMGTIRTLTGNTFSLADCIPLLRKTLKDESSVTCKLACTAVRNCVMSLCSSSYSELGLQLIIDVLTLRNSSYWLVRTELLETLAEIDFRLVSFLEAKAENLHRGAHHYTGLLKLQERVLNNVVIHLLGDEDPRVRHVAAASLIRLVPKLFYKCDQGQADPVVAVARDQSSVYLKLLMHETQPPSHFSVSTITRIYRGYNLLPSITDVTMENNLSRVIAAVSHELITSTTRALTFGCCEALCLLSTAFPVCIWSLGWHCGVPPLSASDESRKSCTVGMATMILTLLSSAWFPLDLSAHQDALILAGNLLAASAPKSLRSSWASEEEANPAATKQEEVWPALGDRALVPMVEQLFSHLLKVINICAHVLDDVAPGPAIKAALPSLTNPPSLSPIRRKGKEKEPGEQASVPLSPKKGSEASAASRQSDTSGPVTTSKSSSLGSFYHLPSYLKLHDVLKATHANYKVTLDLQNSTEKFGGFLRSALDVLSQILELATLQDIGKCVEEILGYLKSCFSREPMMATVCVQQLLKTLFGTNLASQFDGLSSNPSKSQGRAQRLGSSSVRPGLYHYCFMAPYTHFTQALADASLRNMVQAEQENDTSGWFDVLQKVSTQLKTNLTSVTKNRADKNAIHNHIRLFEPLVIKALKQYTTTTCVQLQKQVLDLLAQLVQLRVNYCLLDSDQVFIGFVLKQFEYIEVGQFRESEAIIPNIFFFLVLLSYERYHSKQIIGIPKIIQLCDGIMASGRKAVTHAIPALQPIVHDLFVLRGTNKADAGKELETQKEVVVSMLLRLIQYHQVLEMFILVLQQCHKENEDKWKRLSRQIADIILPMLAKQQMHIDSHEALGVLNTLFEILAPSSLRPVDMLLRSMFVTPNTMASVSTVQLWISGILAILRVLISQSTEDIVLSRIQELSFSPYLISCTVINRLRDGDSTSTLEEHSEGKQIKNLPEETFSRFLLQLVGILLEDIVTKQLKVEMSEQQHTFYCQELGTLLMCLIHIFKSGMFRRITAAATRLFRSDGCGGSFYTLDSLNLRARSMITTHPALVLLWCQILLLVNHTDYRWWAEVQQTPKRHSLSSTKLLSPQMSGEEEDSDLAAKLGMCNREIVRRGALILFCDYVCQNLHDSEHLTWLIVNHIQDLISLSHEPPVQDFISAVHRNSAASGLFIQAIQSRCENLSTPTMLKKTLQCLEGIHLSQSGAVLTLYVDRLLCTPFRVLARMVDILACRRVEMLLAANLQSSMAQLPMEELNRIQEYLQSSGLAQRHQRLYSLLDRFRLSTMQDSLSPSPPVSSHPLDGDGHVSLETVSPDKDWYVHLVKSQCWTRSDSALLEGAELVNRIPAEDMNAFMMNSEFNLSLLAPCLSLGMSEISGGQKSALFEAAREVTLARVSGTVQQLPAVHHVFQPELPAEPAAYWSKLNDLFGDAALYQSLPTLARALAQYLVVVSKLPSHLHLPPEKEKDIVKFVVATLEALSWHLIHEQIPLSLDLQAGLDCCCLALQLPGLWSVVSSTEFVTHACSLIYCVHFILEAVAVQPGEQLLSPERRTNTPKAISEEEEEVDPNTQNPKYITAACEMVAEMVESLQSVLALGHKRNSGVPAFLTPLLRNIIISLARLPLVNSYTRVPPLVWKLGWSPKPGGDFGTAFPEIPVEFLQEKEVFKEFIYRINTLGWTSRTQFEETWATLLGVLVTQPLVMEQEESPPEEDTERTQINVLAVQAITSLVLSAMTVPVAGNPAVSCLEQQPRNKPLKALDTRFGRKLSIIRGIVEQEIQAMVSKRENIATHHLYQAWDPVPSLSPATTGALISHEKLLLQINPERELGSMSYKLGQVSIHSVWLGNSITPLREEEWDEEEEEEADAPAPSSPPTSPVNSRKHRAGVDIHSCSQFLLELYSRWILPSSSARRTPAILISEVVRSLLVVSDLFTERNQFELMYVTLTELRRVHPSEDEILAQYLVPATCKAAAVLGMDKAVAEPVSRLLESTLRSSHLPSRVGALHGVLYVLECDLLDDTAKQLIPVISDYLLSNLKGIAHCVNIHSQQHVLVMCATAFYLIENYPLDVGPEFSASIIQMCGVMLSGSEESTPSIIYHCALRGLERLLLSEQLSRLDAESLVKLSVDRVNVHSPHRAMAALGLMLTCMYTGKEKVSPGRTSDPNPAAPDSESVIVAMERVSVLFDRIRKGFPCEARVVARILPQFLDDFFPPQDIMNKVIGEFLSNQQPYPQFMATVVYKVFQTLHSTGQSSMVRDWVMLSLSNFTQRAPVAMATWSLSCFFVSASTSPWVAAILPHVISRMGKLEQVDVNLFCLVATDFYRHQIEEELDRRAFQSVLEVVAAPGSPYHRLLTCLRNVHKVTTC

SEQ ID NO: 3127 - protein, 266 aa, Homo sapiens
MVKVTFNSALAQKEAKKDEPKSGEEALIIPPDAVAVDCKDPDDVVPVGQRRAWCWCMCFGLAFMLAGVILGGAYLYKYFALQPDDVYYCGIKYIKDDVILNEPSADAPAALYQTIEENIKIFEEEEVEFISVPVPEFADSDPANIVHDFNKKLTAYLDLNLDKCYVIPLNTSIVMPPRNLLELLINIKAGTYLPQSYLIHEHMVITDRIENIDHLGFFIYRLCHDKETYKLQRRETIKGIQKREASNCFAIRHFENKFAVETLICS

SEQ ID NO: 3128 - protein, 146 aa, Homo sapiens
MAGPLRAPLLLLAILAVALAVSPAAGSSPGKPPRLVGGPMDASVEEEGVRRALDFAVGEYNKASNDMYHSRALQVVRARKQIVAGVNYFLDVELGRTTCTKTQPNLDNCPFHDQPHLKRKAFCSFQIYAVPWQGTMTLSKSTCQDA

SEQ ID NO: 3129 - protein, 2321 aa, Homo sapiens
MGPGARGRRRRRRPMSPPPPPPPVRALPLLLLLAGPGAAAPPCLDGSPCANGGRCTQLPSREAACLCPPGWVGERCQLEDPCHSGPCAGRGVCQSSVVAGTARFSCRCPRGFRGPDCSLPDPCLSSPCAHGARCSVGPDGRFLCSCPPGYQGRSCRSDVDECRVGEPCRHGGTCLNTPGSFRCQCPAGYTGPLCENPAVPCAPSPCRNGGTCRQSGDLTYDCACLPGFEGQNCEVNVDDCPGHRCLNGGTCVDGVNTYNCQCPPEWTGQFCTEDVDECQLQPNACHNGGTCFNTLGGHSCVCVNGWTGESCSQNIDDCATAVCFHGATCHDRVASFYCACPMGKTGLLCHLDDACVSNPCHEDAICDTNPVNGRAICTCPPGFTGGACDQDVDECSIGANPCEHLGRCVNTQGSFLCQCGRGYTGPRCETDVNECLSGPCRNQATCLDRIGQFTCICMAGFTGTYCEVDIDECQSSPCVNGGVCKDRVNGFSCTCPSGFSGSTCQLDVDECASTPCRNGAKCVDQPDGYECRCAEGFEGTLCDRNVDDCSPDPCHHGRCVDGIASFSCACAPGYTGTRCESQVDECRSQPCRHGGKCLDLVDKYLCRCPSGTTGVNCEVNIDDCASNPCTFGVCRDGINRYDCVCQPGFTGPLCNVEINECASSPCGEGGSCVDGENGFRCLCPPGSLPPLCLPPSHPCAHEPCSHGICYDAPGGFRCVCEPGWSGPRCSQSLARDACESQPCRAGGTCSSDGMGFHCTCPPGVQGRQCELLSPCTPNPCEHGGRCESAPGQLPVCSCPQGWQGPRCQQDVDECAGPAPCGPHGICTNLAGSFSCTCHGGYTGPSCDQDINDCDPNPCLNGGSCQDGVGSFSCSCLPGFAGPRCARDVDECLSNPCGPGTCTDHVASFTCTCPPGYGGFHCEQDLPDCSPSSCFNGGTCVDGVNSFSCLCRPGYTGAHCQHEADPCLSRPCLHGGVCSAAHPGFRCTCLESFTGPQCQTLVDWCSRQPCQNGGRCVQTGAYCLCPPGWSGRLCDIRSLPCREAAAQIGVRLEQLCQAGGQCVDEDSSHYCVCPEGRTGSHCEQEVDPCLAQPCQHGGTCRGYMGGYMCECLPGYNGDNCEDDVDECASQPCQHGGSCIDLVARYLCSCPPGTLGVLCEINEDDCGPGPPLDSGPRCLHNGTCVDLVGGFRCTCPPGYTGLRCEADINECRSGACHAAHTRDCLQDPGGGFRCLCHAGFSGPRCQTVLSPCESQPCQHGGQCRPSPGPGGGLTFTCHCAQPFWGPRCERVARSCRELQCPVGVPCQQTPRGPRCACPPGLSGPSCRSFPGSPPGASNASCAAAPCLHGGSCRPAPLAPFFRCACAQGWTGPRCEAPAAAPEVSEEPRCPRAACQAKRGDQRCDRECNSPGCGWDGGDCSLSVGDPWRQCEALQCWRLFNNSRCDPACSSPACLYDNFDCHAGGRERTCNPVYEKYCADHFADGRCDQGCNTEECGWDGLDCASEVPALLARGVLVLTVLLPPEELLRSSADFLQRLSAILRTSLRFRLDAHGQAMVFPYHRPSPGSEPRARRELAPEVIGSVVMLEIDNRLCLQSPENDHCFPDAQSAADYLGALSAVERLDFPYPLRDVRGEPLEPPEPSVPLLPLLVAGAVLLLVILVLGVMVARRKREHSTLWFPEGFSLHKDVASGHKGRREPVGQDALGMKNMAKGESLMGEVATDWMDTECPEAKRLKVEEPGMGAEEAVDCRQWTQHHLVAADIRVAPAMALTPPQGDADADGMDVNVRGPDGFTPLMLASFCGGALEPMPTEEDEADDTSASIISDLICQGAQLGARTDRTGETALHLAARYARADAAKRLLDAGADTNAQDHSGRTPLHTAVTADAQGVFQILIRNRSTDLDARMADGSTALILAARLAVEGMVEELIASHADVNAVDELGKSALHWAAAVNNVEATLALLKNGANKDMQDSKEETPLFLAAREGSYEAAKLLLDHFANREITDHLDRLPRDVAQERLHQDIVRLLDQPSGPRSPPGPHGLGPLLCPPGAFLPGLKAAQSGSKKSRRPPGKAGLGPQGPRGRGKKLTLACPGPLADSSVTLSPVDSLDSPRPFGGPPASPGGFPLEGPYAAATATAVSLAQLGGPGRAGLGRQPPGGCVLSLGLLNPVAVPLDWARLPPPAPPGPSFLLPLAPGPQLLNPGTPVSPQERPPPYLAVPGHGEEYPAAGAHSSPPKARFLRVPSEHPYLTPSPESPEHWASPSPPSLSDWSESTPSPATATGAMATTTGALPAQPLPLSVPSSLAQAQTQLGPQPEVTPKRQVLA

SEQ ID NO: 3130 - protein, 432 aa, Homo sapiens
MERRRITSAARRSYVSSGEMMVGGLAPGRRLGPGTRLSLARMPPPLPTRVDFSLAGALNAGFKETRASERAEMMELNDRFASYIEKVRFLEQQNKALAAELNQLRAKEPTKLADVYQAELRELRLRLDQLTANSARLEVERDNLAQDLATVRQKLQDETNLRLEAENNLAAYRQEADEATLARLDLERKIESLEEEIRFLRKIHEEEVRELQEQLARQQVHVELDVAKPDLTAALKEIRTQYEAMASSNMHEAEEWYRSKFADLTDAAARNAELLRQAKHEANDYRRQLQSLTCDLESLRGTNESLERQMREQEERHVREAASYQEALARLEEEGQSLKDEMARHLQEYQDLLNVKLALDIEIATYRKLLEGEENRITIPVQTFSNLQIRETSLDTKSVSEGHLKRNIVVKTVEMRDGEVIKESKQEHKDVM

SEQ ID NO: 3131 - protein, 398 aa, Homo sapiens
MVNDPPVPALLWAQEVGQVLAGRARRLLLQFGVLFCTILLLLWVSVFLYGSFYYSYMPTVSHLSPVHFYYRTDCDSSTTSLCSFPVANVSLTKGGRDRVLMYGQPYRVTLELELPESPVNQDLGMFLVTISCYTRGGRIISTSSRSVMLHYRSDLLQMLDTLVFSSLLLFGFAEQKQLLEVELYADYRENSYVPTTGAIIEIHSKRIQLYGAYLRIHAHFTGLRYLLYNFPMTCAFIGVASNFTFLSVIVLFSYMQWVWGGIWPRHRFSLQVNIRKRDNSRKEVQRRISAHQPGPEGQEESTPQSDVTEDGESPEDPSGTEGQLSEEEKPDQQPLSGEEELEPEASDGSGSWEDAALLTEANLPAPAPASASAPVLETLGSSEPAGGALRQRPTCSSS

SEQ ID NO: 3132 - protein, 147 aa, Homo sapiens
MASHRLLLLCLAGLVFVSEAGPTGTGESKCPLMVKVLDAVRGSPAINVAVHVFRKAADDTWEPFASGKTSESGELHGLTTEEEFVEGIYKVEIDTKSYWKALGISPFHEHAEVVFTANDSGPRRYTIAALLSPYSYSTTAVVTNPKE

SEQ ID NO: 3133 - protein, 418 aa, Homo sapiens
MPSSVSWGILLLAGLCCLVPVSLAEDPQGDAAQKTDTSHHDQDHPTFNKITPNLAEFAFSLYRQLAHQSNSTNIFFSPVSIATAFAMLSLGTKADTHDEILEGLNFNLTEIPEAQIHEGFQELLRTLNQPDSQLQLTTGNGLFLSEGLKLVDKFLEDVKKLYHSEAFTVNFGDTEEAKKQINDYVEKGTQGKIVDLVKELDRDTVFALVNYIFFKGKWERPFEVKDTEEEDFHVDQVTTVKVPMMKRLGMFNIQHCKKLSSWVLLMKYLGNATAIFFLPDEGKLQHLENELTHDIITKFLENEDRRSASLHLPKLSITGTYDLKSVLGQLGITKVFSNGADLSGVTEEAPLKLSKAVHKAVLTIDEKGTEAAGAMFLEAIPMSIPPEVKFNKPFVFLMIEQNTKSPLFMGKVVNPTQK

SEQ ID NO: 3134 - protein, 107 aa, Homo sapiens [sequence omitted]

SEQ ID NO: 3135 - protein, 330 aa, Homo sapiens [sequence omitted]

SEQ ID NO: 3136 - protein, 122 aa, Homo sapiens
MKLLTGLVFCSLVLGVSSRSFFSFLGEAFDGARDMWRAYSDMREANYIGSDKYFHARGNYDAAKRGPGGVWAAEAISDARENIQRFFGHGAEDSLADQAANEWGRSGKDPNHFRPAGLPEKY

SEQ ID NO: 3137 - protein, 89 aa, Homo sapiens
MGILKLQVFLIVLSVALNHLKATPIESHQVEKRKCNTATCATQRLANFLVHSSNNFGAILSSTNVGSNTYGKRNAVEVLKREPLNYLPL

SEQ ID NO: 3138 - protein, 387 aa, Homo sapiens
MPRPRLLAALCGALLCAPSLLVALDICSKNPCHNGGLCEEISQEVRGDVFPSYTCTCLKGYAGNHCETKCVEPLGLENGNIANSQIAASSVRVTFLGLQHWVPELARLNRAGMVNAWTPSSNDDNPWIQVNLLRRMWVTGVVTQGASRLASHEYLKAFKVAYSLNGHEFDFIHDVNKKHKEFVGNWNKNAVHVNLFETPVEAQYVRLYPTSCHTACTLRFELLGCELNGCANPLGLKNNSIPDKQITASSSYKTWGLHLFSWNPSYARLDKQGNFNAWVAGSYGNDQWLQVDLGSSKEVTGIITQGARNFGSVQFVASYKVAYSNDSANWTEYQDPRTGSSKIFPGNWDNHSHKKNLFETPILARYVRILPVAWHNRIALRLELLGC

SEQ ID NO: 3139 - protein, 267 aa, Homo sapiens
MKAAVLTLAVLFLTGSQARHFWQQDEPPQSPWDRVKDLATVYVDVLKDSGRDYVSQFEGSALGKQLNLKLLDNWDSVTSTFSKLREQLGPVTQEFWDNLEKETEGLRQEMSKDLEEVKAKVQPYLDDFQKKWQEEMELYRQKVEPLRAELQEGARQKLHELQEKLSPLGEEMRDRARAHVDALRTHLAPYSDELRQRLAARLEALKENGGARLAEYHAKATEHLSTLSEKAKPALEDLRQGLLPVLESFKVSFLSALEEYTKKLNTQ

SEQ ID NO: 3140 - protein, 100 aa, Homo sapiens
MKLLAATVLLLTICSLEGALVRRQAKEPCVESLVSQYFQTVTDYGKDLMEKVKSPELQAEAKSYFEKSKEQLTPLIKKAGTELVNFLSYFVELGTQPATQ

SEQ ID NO: 3141 - protein, 396 aa, Homo sapiens [sequence omitted]

SEQ ID NO: 3142 - protein, 782 aa, Homo sapiens
MAPHRPAPALLCALSLALCALSLPVRAATASRGASQAGAPQGRVPEARPNSMVVEHPEFLKAGKEPGLQIWRVEKFDLVPVPTNLYGDFFTGDAYVILKTVQLRNGNLQYDLHYWLGNECSQDESGAAAIFTVQLDDYLNGRAVQHREVQGFESATFLGYFKSGLKYKKGGVASGFKHVVPNEVVVQRLFQVKGRRVVRATEVPVSWESFNNGDCFILDLGNNIHQWCGSNSNRYERLKATQVSKGIRDNERSGRARVHVSEEGTEPEAMLQVLGPKPALPAGTEDTAKEDAANRKLAKLYKVSNGAGTMSVSLVADENPFAQGALKSEDCFILDHGKDGKIFVWKGKQANTEERKAALKTASDFITKMDYPKQTQVSVLPEGGETPLFKQFFKNWRDPDQTDGLGLSYLSSHIANVERVPFDAATLHTSTAMAAQHGMDDDGTGQKQIWRIEGSNKVPVDPATYGQFYGGDSYIILYNYRHGGRQGQIIYNWQGAQSTQDEVAASAILTAQLDEELGGTPVQSRVVQGKEPAHLMSLFGGKPMIIYKGGTSREGGQTAPASTRLFQVRANSAGATRAVEVLPKAGALNSNDAFVLKTPSAAYLWVGTGASEAEKTGAQELLRVLRAQPVQVAEGSEPDGFWEALGGKAAYRTSPRLKDKKMDAHPPRLFACSNKIGRFVIEEVPGELMQEDLATDDVMLLDTWDQVFVWVGKDSQEEEKTEALTSAKRYIETDPANRDRRTPITVVKQGFEPPSFVGWFLGWDDDYWSVDPLDRAMAELAA

SEQ ID NO: 3143 - protein, 148 aa, Homo sapiens
MKALIVLGLVLLSVTVQGKVFERCELARTLKRLGMDGYRGISLANWMCLAKWESGYNTRATNYNAGDRSTDYGIFQINSRYWCNDGKTPGAVNACHLSCSALLQDNIADAVACAKRVVRDPQGIRAWVAWRNRCQNRDVRQYVQGCGV

SEQ ID NO: 3144 - protein, 866 aa, Homo sapiens
MFSMRIVCLVLSVVGTAWTADSGEGDFLAEGGGVRGPRVVERHQSACKDSDWPFCSDEDWNYKCPSGCRMKGLIDEVNQDFTNRINKLKNSLFEYQKNNKDSHSLTTNIMEILRGDFSSANNRDNTYNRVSEDLRSRIEVLKRKVIEKVQHIQLLQKNVRAQLVDMKRLEVDIDIKIRSCRGSCSRALAREVDLKDYEDQQKQLEQVIAKDLLPSRDRQHLPLIKMKPVPDLVPGNFKSQLQKVPPEWKALTDMPQMRMELERPGGNEITRGGSTSYGTGSETESPRNPSSAGSWNSGSSGPGSTGNRNPGSSGTGGTATWKPGSSGPGSTGSWNSGSSGTGSTGNQNPGSPRPGSTGTWNPGSSERGSAGHWTSESSVSGSTGQWHSESGSFRPDSPGSGNARPNNPDWGTFEEVSGNVSPGTRREYHTEKLVTSKGDKELRTGKEKVTSGSTTTTRRSCSKTVTKTVIGPDGHKEVTKEVVTSEDGSDCPEAMDLGTLSGIGTLDGFRHRHPDEAAFFDTASTGKTFPGFFSPMLGEFVSETESRGSESGIFTNTKESSSHHPGIAEFPSRGKSSSYSKQFTSSTSYNRGDSTFESKSYKMADEAGSEADHEGTHSTKRGHAKSRPVRDCDDVLQTHPSGTQSGIFNIKLPGSSKIFSVYCDQETSLGGWLLIQQRMDGSLNFNRTWQDYKRGFGSLNDEGEGEFWLGNDYLHLLTQRGSVLRVELEDWAGNEAYAEYHFRVGSEAEGYALQVSSYEGTAGDALIEGSVEEGAEYTSHNNMQFSTFDRDADQWEENCAEVYGGGWWYNNCQAANLNGIYYPGGSYDPRNNSPYEIENGVVWVSFRGADYSLRAVRMKIRPLVTQ

SEQ ID NO: 3145 - protein, 491 aa, Homo sapiens
MKRMVSWSFHKLKTMKHLLLLLLCVFLVKSQGVNDNEEGFFSARGHRPLDKKREEAPSLRPAPPPISGGGYRARPAKAAATQKKVERKAPDAGGCLHADPDLGVLCPTGCQLQEALLQQERPIRNSVDELNNNVEAVSQTSSSSFQYMYLLKDLWQKRQKQVKDNENVVNEYSSELEKHQLYIDETVNSNIPTNLRVLRSILENLRSKIQKLESDVSAQMEYCRTPCTVSCNIPVVSGKECEEIIRKGGETSEMYLIQPDSSVKPYRVYCDMNTENGGWTVIQNRQDGSVDFGRKWDPYKQGFGNVATNTDGKNYCGLPGEYWLGNDKISQLTRMGPTELLIEMEDWKGDKVKAHYGGFTVQNEANKYQISVNKYRGTAGNALMDGASQLMGENRTMTIHNGMFFSTYDRDNDGWLTSDPRKQCSKEDGGGWWYNRCHAANPNGRYYWGGQYTWDMAKHGTDDGVVWMNWKGSWYSMRKMSMKIRPFFPQQ

SEQ ID NO: 3146 - protein, 119 aa, Homo sapiens
MSRSVALAVLALLSLSGLEAIQRTPKIQVYSRHPAENGKSNFLNCYVSGFHPSDIEVDLLKNGERIEKVEHSDLSFSKDWSFYLLYYTEFTPTEKDEYACRVNHVTLSQPKIVKWDRDM

SEQ ID NO: 3147 - protein, 173 aa, Homo sapiens
MDVTIQHPWFKRTLGPFYPSRLFDQFFGEGLFEYDLLPFLSSTISPYYRQSLFRTVLDSGISEVRSDRDKFVIFLDVKHFSPEDLTVKVQDDFVEIHGKHNERQDDHGYISREFHRRYRLPSNVDQSALSCSLSADGMLTFCGPKIQTGLDATHAERAIPVSREEKPTSAPSS

SEQ ID NO: 3148 - protein, 348 aa, Homo sapiens [sequence omitted]

SEQ ID NO: 3149 - protein, 141 aa, Homo sapiens
MGFQKFSPFLALSILVLLQAGSLHAAPFRSALESSPADPATLSEDEARLLLAALVQDYVQMKASELEQEQEREGSSLDSPRSKRCGNLSTCMLGTYTQDFNKFHTFPQTAIGVGAPGKKRDMSSDLERDHRPHVSMPQNAN

SEQ ID NO: 3150 - protein, 153 aa, Homo sapiens [sequence omitted]

SEQ ID NO: 3151 - protein, 227 aa, Homo sapiens
MNIKGSPWKGSLLLLLVSNLLLCQSVAPLPICPGGAARCQVTLRDLFDRAVVLSHYIHNLSSEMFSEFDKRYTHGRGFITKAINSCHTSSLATPEDKEQAQQMNQKDFLSLIVSILRSWNEPLYHLVTEVRGMQEAPEAILSKAVEIEEQTKRLLEGMELIVSQVHPETKENEIYPVWSGLPSLQMADEESRLSAYYNLLHCLRRDSHKIDNYLKLLKCRIIHNNNC

SEQ ID NO: 3152 - protein, 683 aa, Homo sapiens
MALFVRLLALALALALGPAATLAGPAKSPYQLVLQHSRLRGRQHGPNVCAVQKVIGTNRKYFTNCKQWYQRKICGKSTVISYECCPGYEKVPGEKGCPAALPLSNLYETLGVVGSTTTQLYTDRTEKLRPEMEGPGSFTIFAPSNEAWASLPAEVLDSLVSNVNIELLNALRYHMVGRRVLTDELKHGMTLTSMYQNSNIQIHHYPNGIVTVNCARLLKADHHATNGVVHLIDKVISTITNNIQQIIEIEDTFETLRAAVAASGLNTMLEGNGQYTLLAPTNEAFEKIPSETLNRILGDPEALRDLLNNHILKSAMCAEAIVAGLSVETLEGTTLEVGCSGDMLTINGKAIISNKDILATNGVIHYIDELLIPDSAKTLFELAAESDVSTAIDLFRQAGLGNHLSGSERLTLLAPLNSVFKDGTPPIDAHTRNLLRNHIIKDQLASKYLYHGQTLETLGGKKLRVFVYRNSLCIENSCIAAHDKRGRYGTLFTMDRVLTPPMGTVMDVLKGDNRFSMLVAAIQSAGLTETLNREGVYTVFAPTNEAFRALPPRERSRLLGDAKELANILKYHIGDEILVSGGIGALVRLKSLQGDKLEVSLKNNVVSVNKEPVAEPDIMATNGVVHVITNVLQPPANRPQERGDELADSALEIFKQASAFSRASQRSVRLAPVYQKLLERMKH

SEQ ID NO: 3153 - protein, 505 aa, Homo sapiens
MTCGSGFGGRAFSCISACGPRPGRCCITAAPYRGISCYRGLTGGFGSHSVCGGFRAGSCGRSFGYRSGGVCGPSPPCITTVSVNESLLTPLNLEIDPNAQCVKQEEKEQIKSLNSRFAAFIDKVRFLEQQNKLLETKLQFYQNRECCQSNLEPLFEGYIETLRREAECVEADSGRLASELNHVQEVLEGYKKKYEEEVSLRATAENEFVALKKDVDCAYLRKSDLEANVEALIQEIDFLRRLYEEEILILQSHISDTSVVVKLDNSRDLNMDCIIAEIKAQYDDIVTRSRAEAESWYRSKCEEMKATVIRHGETLRRTKEEINELNRMIQRLTAEVENAKCQNSKLEAAVAQSEQQGEAALSDARCKLAELEGALQKAKQDMACLIREYQEVMNSKLGLDIEIATYRRLLEGEEQRLCEGIGAVNVCVSSSRGGVVCGDLCVSGSRPVTGSVCSAPCNGNVAVSTGLCAPCGQLNTTCGGGSCGVGSCGISSLGVGSCGSSCRKC

SEQ ID NO: 3154 - protein, 639 aa, Homo sapiens
MSCQISCKSRGRGGGGGGFRGFSSGSAVVSGGSRRSTSSFSCLSRHGGGGGGFGGGGFGSRSLVGLGGTKSISISVAGGGGGFGAAGGFGGRGGGFGGGSSFGGGSGFSGGGFGGGGFGGGRFGGFGGPGGVGGLGGPGGFGPGGYPGGIHEVSVNQSLLQPLNVKVDPEIQNVKAQEREQIKTLNNKFASFIDKVRFLEQQNQVLQTKWELLQQMNVGTRPINLEPIFQGYIDSLKRYLDGLTAERTSQNSELNNMQDLVEDYKKKYEDEINKRTAAENDFVTLKKDVDNAYMIKVELQSKVDLLNQEIEFLKVLYDAEISQIHQSVTDTNVILSMDNSRNLDLDSIIAEVKAQYEEIAQRSKEEAEALYHSKYEELQVTVGRHGDSLKEIKIEISELNRVIQRLQGEIAHVKKQCKNVQDAIADAEQRGEHALKDARNKLNDLEEALQQAKEDLARLLRDYQELMNVKLALDVEIATYRKLLEGEECRMSGDLSSNVTVSVTSSTISSNVASKAAFGGSGGRGSSSGGGYSSGSSSYGSGGRQSGSRGGSGGGGSISGGGYGSGGGSGGRYGSGGGSKGGSISGGGYGSGGGKHSSGGGSRGGSSSGGGYGSGGGGSSSVKGSSGEAFGSSVTFSFR

SEQ ID NO: 3155 - protein, 710 aa, Homo sapiens
MKLVFLVLLFLGALGLCLAGRRRSVQWCAVSQPEATKCFQWQRNMRKVRGPPVSCIKRDSPIQCIQAIAENRADAVTLDGGFIYEAGLAPYKLRPVAAEVYGTERQPRTHYYAVAVVKKGGSFQLNELQGLKSCHTGLRRTAGWNVPIGTLRPFLNWTGPPEPIEAAVARFFSASCVPGADKGQFPNLCRLCAGTGENKCAFSSQEPYFSYSGAFKCLRDGAGDVAFIRESTVFEDLSDEAERDEYELLCPDNTRKPVDKFKDCHLARVPSHAVVARSVNGKEDAIWNLLRQAQEKFGKDKSPKFQLFGSPSGQKDLLFKDSAIGFSRVPPRIDSGLYLGSGYFTAIQNLRKSEEEVAARRARVVWCAVGEQELRKCNQWSGLSEGSVTCSSASTTEDCIALVLKGEADAMSLDGGYVYTAGKCGLVPVLAENYKSQQSSDPDPNCVDRPVEGYLAVAVVRRSDTSLTWNSVKGKKSCHTAVDRTAGWNIPMGLLFNQTGSCKFDEYFSQSCAPGSDPRSNLCALCIGDEQGENKCVPNSNERYYGYTGAFRCLAENAGDVAFVKDVTVLQNTDGNNNEAWAKDLKLADFALLCLDGKRKPVTEARSCHLAMAPNHAVVSRMDKVERLKQVLLHQQAKFGRNGSDCPDKFCLFQSETKNLLFNDNTECLARLHGKTTYEKYLGPQYVAGITNLKKCSTSPLLEACEFLRK

SEQ ID NO: 3156 - protein, 197 aa, Homo sapiens
MDVGSKEVLMESPPDYSAAPRGRFGIPCCPVHLKRLLIVVVVVVLIVVVIVGALLMGLHMSQKHTEMVLEMSIGAPEAQQRLALSEHLVTTATFSIGSTGLVVYDYQQLLIAYKPAPGTCCYIMKIAPESIPSLEALNRKVHNFQMECSLQAKPAVPTSKLGQAEGRDAGSAPSGGDPAFLGMAVNTLCGEVPLYYI

SEQ ID NO: 3157 - protein, 279 aa, Homo sapiens
MKIIILLGFLGATLSAPLIPQRLMSASNSNELLLNLNNGQLLPLQLQGPLNSWIPPFSGILQQQQQAQIPGLSQFSLSALDQFAGLLPNQIPLTGEASFAQGAQAGQVDPLQLQTPPQTQPGPSHVMPYVFSFKMPQEQGQMFQYYPVYMVLPWEQPQQTVPRSPQQTRQQQYEEQIPFYAQFGYIPQLAEPAISGGQQQLAFDPQLGTAPEIAVMSTGEEIPYLQKEAINFRHDSAGVFMPSTSPKPSTTNVFTSAVDQTITPELPEEKDKTDSLREP

SEQ ID NO: 3158 - protein, 462 aa, Homo sapiens
MKPNIIFVLSLLLILEKQAAVMGQKGGSKGRLPSEFSQFPHGQKGQHYSGQKGKQQTESKGSFSIQYTYHVDANDHDQSRKSQQYDLNALHKTTKSQRHLGGSQQLLHNKQEGRDHDKSKGHFHRVVIHHKGGKAHRGTQNPSQDQGNSPSGKGISSQYSNTEERLWVHGLSKEQTSVSGAQKGRKQGGSQSSYVLQTEELVANKQQRETKNSHQNKGHYQNVVEVREEHSSKVQTSLCPAHQDKLQHGSKDIFSTQDELLVYNKNQHQTKNLNQDQQHGRKANKISYQSSSTEERRLHYGENGVQKDVSQSSIYSQTEEKAQGKSQKQITIPSQEQEHSQKANKISYQSSSTEERRLHYGENGVQKDVSQRSIYSQTEKLVAGKSQIQAPNPKQEPWHGENAKGESGQSTNREQDLLSHEQKGRHQHGSHGGLDIVIIEQEDDSDRHLAQHLNNDRNPLFT

SEQ ID NO: 3159 - protein, 101 aa, Homo sapiens
MGTRLLPALFLVLLVLGFEVQGTQQPQQDEMPSPTFLTQVKESLSSYWESAKTAAQNLYEKTYLPAVDEKLRDLYSKSTAAMSTYTGIFTDQVLSVLKGEE

SEQ ID NO: 3160 - protein, 99 aa, Homo sapiens
MQPRVLLVVALLALLASARASEAEDASLLSFMQGYMKHATKTAKDALSSVQESQVAQQARGWVTDGFSSLKDYWSTVKDKFSEFWDLDPEVRPTSAVAA

SEQ ID NO: 3161 - protein, 151 aa, Homo sapiens
MFSTKALLLAGLISTALAGPWANICAGKSSNEIRTCDRHGCGQYSAQRSQRPHQGVDILCSAGSTVYAPFTGMIVGQEKPYQNKNAINNGVRISGRGFCVKMFYIKPIKYKGPIKKGEKLGTLLPLQKVYPGIQSHVHIENCDSSDPTAYL

SEQ ID NO: 3162 - protein, 110 aa, Homo sapiens
MALWMRLLPLLALLALWGPDPAAAFVNQHLCGSHLVEALYLVCGERGFFYTPKTRREAEDLQVGQVELGGGPGAGSLQPLALEGSLQKRGIVEQCCTSICSLYQLENYCN

SEQ ID NO: 3163 - protein, 136 aa, Homo sapiens
MSNVPHKSSLPEGIRPGTVLRIRGLVPPNASRFHVNLLCGEEQGSDAALHFNPRLDTSEVVFNSKEQGSWGREERGPGVPFQRGQPFEVLIIASDDGFKAVVGDAQYHHFRHRLPLARVRLVEVGGDVQLDSVRIF

SEQ ID NO: 3164 - protein, 529 aa, Homo sapiens
MGSSRAPWMGRVGGHGMMALLLAGLLLPGTLAKSIGTFSDPCKDPTRITSPNDPCLTGKGDSSGFSSYSGSSSSGSSISSARSSGGGSSGSSSGSSIAQGGSAGSFKPGTGYSQVSYSSGSGSSLQGASGSSQLGSSSSHSGNSGSHSGSSSSHSSSSSSFQFSSSSFQVGNGSALPTNDNSYRGILNPSQPGQSSSSSQTSGVSSSGQSVSSNQRPCSSDIPDSPCSGGPIVSHSGPYIPSSHSVSGGQRPVVVVVDQHGSGAPGVVQGPPCSNGGLPGKPCPPITSVDKSYGGYEVVGGSSDSYLVPGMTYSKGKIYPVGYFTKENPVKGSPGVPSFAAGPPISEGKYFSSNPIIPSQSAASSAIAFQPVGTGGVQLCGGGSTGSKGPCSPSSSRVPSSSSISSSSGSPYHPCGSASQSPCSPPGTGSFSSSSSSQSSGKIILQPCGSKSSSSGHPCMSVSSLTLTGGPDGSPHPDPSAGAKPCGSSSAGKIPCRSIRDILAQVKPLGPQLADPEVFLPQGELLDSP

SEQ ID NO: 3165 - protein, 1480 aa, Homo sapiens
MQRSPLEKASVVSKLFFSWTRPILRKGYRQRLELSDIYQIPSVDSADNLSEKLEREWDRELASKKNPKLINALRRCFFWRFMFYGIFLYLGEVTKAVQPLLLGRIIASYDPDNKEERSIAIYLGIGLCLLFIVRTLLLHPAIFGLHHIGMQMRIAMFSLIYKKTLKLSSRVLDKISIGQLVSLLSNNLNKFDEGLALAHFVWIAPLQVALLMGLIWELLQASAFCGLGFLIVLALFQAGLGRMMMKYRDQRAGKISERLVITSEMIENIQSVKAYCWEEAMEKMIENLRQTELKLTRKAAYVRYFNSSAFFFSGFFVVFLSVLPYALIKGIILRKIFTTISFCIVLRMAVTRQFPWAVQTWYDSLGAINKIQDFLQKQEYKTLEYNLTTTEVVMENVTAFWEEGFGELFEKAKQNNNNRKTSNGDDSLFFSNFSLLGTPVLKDINFKIERGQLLAVAGSTGAGKTSLLMVIMGELEPSEGKIKHSGRISFCSQFSWIMPGTIKENIIFGVSYDEYRYRSVIKACQLEEDISKFAEKDNIVLGEGGITLSGGQRARISLARAVYKDADLYLLDSPFGYLDVLTEKEIFESCVCKLMANKTRILVTSKMEHLKKADKILILHEGSSYFYGTFSELQNLQPDFSSKLMGCDSFDQFSAERRNSILTETLHRFSLEGDAPVSWTETKKQSFKQTGEFGEKRKNSILNPINSIRKFSIVQKTPLQMNGIEEDSDEPLERRLSLVPDSEQGEAILPRISVISTGPTLQARRRQSVLNLMTHSVNQGQNIHRKTTASTRKVSLAPQANLTELDIYSRRLSQETGLEISEEINEEDLKECFFDDMESIPAVTTWNTYLRYITVHKSLIFVLIWCLVIFLAEVAASLVVLWLLGNTPLQDKGNSTHSRNNSYAVIITSTSSYYVFYIYVGVADTLLAMGFFRGLPLVHTLITVSKILHHKMLHSVLQAPMSTLNTLKAGGILNRFSKDIAILDDLLPLTIFDFIQLLLIVIGAIAVVAVLQPYIFVATVPVIVAFIMLRAYFLQTSQQLKQLESEGRSPIFTHLVTSLKGLWTLRAFGRQPYFETLFHKALNLHTANWFLYLSTLRWFQMRIEMIFVIFFIAVTFISILTTGEGEGRVGIILTLAMNIMSTLQWAVNSSIDVDSLMRSVSRVFKFIDMPTEGKPTKSTKPYKNGQLSKVMIIENSHVKKDDIWPSGGQMTVKDLTAKYTEGGNAILENISFSISPGQRVGLLGRTGSGKSTLLSAFLRLLNTEGEIQIDGVSWDSITLQQWRKAFGVIPQKVFIFSGTFRKNLDPYEQWSDQEIWKVADEVGLRSVIEQFPGKLDFVLVDGGCVLSHGHKQLMCLARSVLSKAKILLLDEPSAHLDPVTYQIIRRTLKQAFADCTVILCEHRIEAMLECQQFLVIEENKVRQYDSIQKLLNERSLFRQAISPSDRVKLFPHRNSSKCKSKPQIAALKEETEEEVQDTRL

1-35. (canceled)

36. A method of treating or preventing a CD25-ve solid tumor in a subject, the method comprising the step of administering a CD25-ADC to the subject;
wherein the CD25-ve solid tumor comprises CD25-ve neoplastic cells and CD25+ve regulatory T cells;
wherein the CD25-ADC is a conjugate of formula L—(D^{L})ₚ, where D^{L} is of formula I or II: [chemical structure]
wherein:
p is from 1 to 8;
L is an antibody (Ab) which is an antibody that binds to CD25;
when there is a double bond present between C2′ and C3′, R¹² is selected from the group consisting of:
(ia) C₅₋₁₀ aryl group, optionally substituted by one or more substituents selected from the group comprising: halo, nitro, cyano, ether, carboxy, ester, C₁₋₇ alkyl, C₃₋₇ heterocyclyl and bis-oxy-C₁₋₃ alkylene;
(ib) C₁₋₅ saturated aliphatic alkyl;
(ic) C₃₋₆ saturated cycloalkyl;
(id) [chemical structure]
R², wherein each of R²¹, R²² and R²³ are independently selected from H, C₁₋₃ saturated alkyl, C₂₋₃ alkenyl, C₂₋₃ alkynyl and cyclopropyl, where the total number of carbon atoms in the R¹² group is no more than 5;
(ie) [chemical structure]
wherein one of R^{25a} and R^{25b} is H and the other is selected from: phenyl, which phenyl is optionally substituted by a group selected from halo, methyl, methoxy; pyridyl; and thiophenyl; and
(if) [chemical structure]
where R²⁴ is selected from: H; C₁₋₃ saturated alkyl; C₂₋₃ alkenyl; C₂₋₃ alkynyl; cyclopropyl; phenyl, which phenyl is optionally substituted by a group selected from halo, methyl, methoxy; pyridyl; and thiophenyl;
when there is a single bond present between C2′ and C3′,
R¹² is [chemical structure]
where R^{26a} and R^{26b} are independently selected from H, F, C₁₋₄ saturated alkyl, C₂₋₃ alkenyl, which alkyl and alkenyl groups are optionally substituted by a group selected from C₁₋₄ alkyl amido and C₁₋₄ alkyl ester; or, when one of R^{26a} and R^{26b} is H, the other is selected from nitrile and a C₁₋₄ alkyl ester;
R⁶ and R⁹ are independently selected from H, R, OH, OR, SH, SR, NH₂, NHR, NRR′, nitro, Me₃Sn and halo;
where R and R′ are independently selected from optionally substituted C₁₋₁₂ alkyl, C₃₋₂₀ heterocyclyl and C₅₋₂₀ aryl groups;
R⁷ is selected from H, R, OH, OR, SH, SR, NH₂, NHR, NHRR′, nitro, Me₃Sn and halo;
R″ is a C₃₋₁₂ alkylene group, which chain may be interrupted by one or more heteroatoms, e.g. O, S, NR^{N2} (where R^{N2} is H or C₁₋₄ alkyl), and/or aromatic rings, e.g. benzene or pyridine;
Y and Y′ are selected from O, S, or NH;
R^{6′}, R^{7′}, R^{9′} are selected from the same groups as R⁶, R⁷ and R⁹ respectively;
A. wherein, if D^{L} is of formula I:R^{L1′} is a linker for connection to the antibody (Ab);
R^{11a} is selected from OH, OR^{A}, where R^{A} is C₁₋₄ alkyl, and SO_{z}M, where z is 2 or 3 and M is a monovalent pharmaceutically acceptable cation;
R²⁰ and R²¹ either together form a double bond between the nitrogen and carbon atoms to which they are bound or;
R²⁰ is selected from H and R^{C}, where R^{C} is a capping group;
R²¹ is selected from OH, OR^{A} and SO_{z}M;
when there is a double bond present between C2 and C3, R² is selected from the group consisting of:
(ia) C₅₋₁₀ aryl group, optionally substituted by one or more substituents selected from the group comprising: halo, nitro, cyano, ether, carboxy, ester, C₁₋₇ alkyl, C₃₋₇ heterocyclyl and bis-oxy-C₁₋₃ alkylene;
(ib) C₁₋₅ saturated aliphatic alkyl;
(ic) C₃₋₆ saturated cycloalkyl;
(id) [chemical structure]
wherein each of R¹¹, R¹² and R¹³ are independently selected from H, C₁₋₃ saturated alkyl, C₂₋₃ alkenyl, C₂₋₃ alkynyl and cyclopropyl, where the total number of carbon atoms in the R² group is no more than 5;
(ie) [chemical structure]
wherein one of R^{15a} and R^{15b} is H and the other is selected from: phenyl, which phenyl is optionally substituted by a group selected from halo, methyl, methoxy; pyridyl; and thiophenyl; and
(if) [chemical structure]
where R¹⁴, where R¹⁴ is selected from: H; C₁₋₃ saturated alkyl; C₂₋₃ alkenyl; C₂₋₃ alkynyl; cyclopropyl; phenyl, which phenyl is optionally substituted by a group selected from halo, methyl, methoxy; pyridyl; and thiophenyl;
when there is a single bond present between C2 and C3,
R² is [chemical structure]
where R^{16a} and R^{16b} are independently selected from H, F, C₁₋₄ saturated alkyl, C₂₋₃ alkenyl, which alkyl and alkenyl groups are optionally substituted by a group selected from C₁₋₄ alkyl amido and C₁₋₄ alkyl ester; or, when one of R^{16a} and R^{16b} is H, the other is selected from nitrile and a C₁₋₄ alkyl ester;
B. wherein, if D^{L} is of formula II:
R²² is of formula IIIa, formula IIIb or formula IIIc:
(a) [chemical structure]
where A is a C₅₋₇ aryl group, and either
(i) Q¹ is a single bond, and Q² is selected from a single bond and —Z—(CH₂)ₙ—, where Z is selected from a single bond, O, S and NH and n is from 1 to 3; or
(ii) Q¹ is —CH═CH—, and Q² is a single bond;
(b) [chemical structure]
where;
R^{C1}, R^{C2} and R^{C3} are independently selected from H and unsubstituted C₁₋₂ alkyl;
(c) [chemical structure]
where Q is selected from O—R^{L2′}, S—R^{L2′} and NR^{N}—R^{L2′}, and R^{N} is selected from H, methyl and ethyl
X is selected from the group comprising: O—R^{L2′}, S—R^{L2′}, CO₂—R^{L2′}, CO—R^{L2′}, NH—C(═O)—R^{L2′}, NHNH—R^{L2′}, CONHNH—R^{L2′}, [chemical structure]
NR^{N}R^{L2′} wherein R^{N} is selected from the group comprising H and C₁₋₄ alkyl;
R^{L2′} is a linker for connection to the antibody (Ab);
R¹⁰ and R¹¹ either together form a double bond between the nitrogen and carbon atoms to which they are bound or;
R¹⁰ is H and R¹¹ is selected from OH, OR^{A} and SO_{z}M;
R³⁰ and R³¹ either together form a double bond between the nitrogen and carbon atoms to which they are bound or;
R³⁰ is H and R³¹ is selected from OH, OR^{A} and SO_{z}M.

37. The method of claim 36, wherein the solid tumour is an established tumour or a metastatic tumour.

38. The method of claim 37, wherein the established tumour is a tumour diagnosed or identified in a naïve subject.

39. The method of claim 37, wherein the established tumour is a relapsed tumour.

40. The method of claim 36, wherein the CD25−ve solid tumor consists of CD25−ve neoplastic cells and CD25+ve regulatory T cells.

41. The method of claim 36, wherein the CD25−ve solid tumor consists of CD25−ve neoplastic cells.

42. The method of claim 36, wherein the solid tumour is selected from the group consisting of pancreatic cancer, breast cancer, colorectal cancer, gastric and oesophageal cancer, melanoma, non-small cell lung cancer, ovarian cancer, hepatocellular carcinoma, renal cell carcinoma, bladder, and head and neck cancer.

43. The method of claim 36, wherein the CD25-ADC is administered in combination with a cell therapy.

44. The method of claim 43, wherein the cell therapy comprises the administration of stem cells and/or immune cells;
optionally wherein the immune cells are CAR-T-cells, T-cells, Natural Killer (NK) cells, Natural Killer T-cell (NKT), Lymphokine-activated Killer (LAK) cells, or macrophages.

45. The method of claim 36, wherein the CD25-ADC is administered in combination with a checkpoint inhibitor or other immunostimulatory agent.

46. The method of claim 45, wherein the checkpoint inhibitor is a PD1 antagonist, a PD-L1 antagonist, a GITR agonist, an OX40 agonist, a CTLA-4 antagonist, or a bi-specific T-cell engager (BiTE).

47. The method of claim 36, wherein the CD25-ADC is administered in combination with radiotherapy.

48. The method of claim 36, wherein the anti-CD25-ADC has the chemical structure: [chemical structure]
wherein the Ab is an anti-CD25 antibody having a VH domain comprising a VH CDR1 with the amino acid sequence of SEQ ID NO.3, a VH CDR2 with the amino acid sequence of SEQ ID NO.4, and a VH CDR3 with the amino acid sequence of SEQ ID NO.5; and a VL domain comprising a VL CDR1 with the amino acid sequence of SEQ ID NO.6, a VL CDR2 with the amino acid sequence of SEQ ID NO.7, and a VL CDR3 with the amino acid sequence of SEQ ID NO.8;
and wherein the drug to antibody ratio (DAR) is between 1 and 8.

49. The method of claim 36, wherein the CD25-ADC is Camidanlumab Tesirine.

50. A method of inducing or enhancing an immune response in a subject, the method comprising the step of administering a CD25-ADC and a disorder-associated antigen (DAA) to the subject;
wherein the CD25-ADC is a conjugate of formula L—(D^{L})ₚ, where D^{L} is of formula I or II: [chemical structure]
wherein:
p is from 1 to 8; L is an antibody (Ab) which is an antibody that binds to CD25;
when there is a double bond present between C2′ and C3′, R¹² is selected from the group consisting of:
(ia) C₅₋₁₀ aryl group, optionally substituted by one or more substituents selected from the group comprising: halo, nitro, cyano, ether, carboxy, ester, C₁₋₇ alkyl, C₃₋₇ heterocyclyl and bis-oxy-C₁₋₃ alkylene;
(ib) C₁₋₅ saturated aliphatic alkyl;
(ic) C₃₋₆ saturated cycloalkyl;
(id) [chemical structure]
wherein each of R²¹, R²² and R²³ are independently selected from H, C₁₋₃ saturated alkyl, C₂₋₃ alkenyl, C₂₋₃ alkynyl and cyclopropyl, where the total number of carbon atoms in the R¹² group is no more than 5;
(ie) [chemical structure]
wherein one of R^{25a} and R^{25b} is H and the other is selected from: phenyl, which phenyl is optionally substituted by a group selected from halo, methyl, methoxy; pyridyl; and thiophenyl; and
(if) [chemical structure]
where R is selected from: H; C₁₋₃ saturated alkyl; C₂₋₃ alkenyl; C₂₋₃ alkynyl; cyclopropyl; phenyl, which phenyl is optionally substituted by a group selected from halo, methyl, methoxy; pyridyl; and thiophenyl;
when there is a single bond present between C2′ and C3′,
R¹² is [chemical structure]
where R^{26a} and R^{26b} are independently selected from H, F, C₁₋₄ saturated alkyl, C₂₋₃ alkenyl, which alkyl and alkenyl groups are optionally substituted by a group selected from C₁₋₄ alkyl amido and C₁₋₄ alkyl ester; or, when one of R^{26a} and R^{26b} is H, the other is selected from nitrile and a C₁₋₄ alkyl ester;
R⁶ and R⁹ are independently selected from H, R, OH, OR, SH, SR, NH₂, NHR, NRR′, nitro, Me₃Sn and halo;
where R and R′ are independently selected from optionally substituted C₁₋₁₂ alkyl, C₃₋₂₀ heterocyclyl and C₅₋₂₀ aryl groups;
R⁷ is selected from H, R, OH, OR, SH, SR, NH₂, NHR, NHRR′, nitro, Me₃Sn and halo;
R″ is a C₃₋₁₂ alkylene group, which chain may be interrupted by one or more heteroatoms, e.g. O, S, NR^{N2} (where R^{N2} is H or C₁₋₄ alkyl), and/or aromatic rings, e.g. benzene or pyridine;
Y and Y′ are selected from O, S, or NH;
R^{6′}, R^{7′}, R^{9′} are selected from the same groups as R⁶, R⁷ and R⁹ respectively;
A. wherein, if D^{L} is of formula I,
R^{L1′} is a linker for connection to the antibody (Ab);
R^{11a} is selected from OH, OR^{A}, where R^{A} is C₁₋₄ alkyl, and SO_{z}M, where z is 2 or 3 and M is a monovalent pharmaceutically acceptable cation;
R²⁰ and R²¹ either together form a double bond between the nitrogen and carbon atoms to which they are bound or;
R²⁰ is selected from H and R^{C}, where R^{C} is a capping group;
R²¹ is selected from OH, OR^{A} and SO_{z}M;
when there is a double bond present between C2 and C3, R² is selected from the group consisting of:
(ia) C₅₋₁₀ aryl group, optionally substituted by one or more substituents selected from the group comprising: halo, nitro, cyano, ether, carboxy, ester, C₁₋₇ alkyl, C₃₋₇ heterocyclyl and bis-oxy-C₁₋₃ alkylene;
(ib) C₁₋₅ saturated aliphatic alkyl;
(ic) C₃₋₆ saturated cycloalkyl;
(id) [chemical structure]
Wherein each of R¹¹, R¹² and R¹³ are independently selected from H, C₁₋₃ saturated alkyl, C₂₋₃ alkenyl, C₂₋₃ alkynyl and cyclopropyl, where the total number of carbon atoms in the R² group is no more than 5;
(ie) [chemical structure]
Wherein one of R^{15a} and R^{15b} is H and the other is selected from: phenyl, which phenyl is optionally substituted by a group selected from halo, methyl, methoxy; pyridyl; and thiophenyl; and
(if) [chemical structure]
where R¹⁴ is selected from: H; C₁₋₃ saturated alkyl; C₂₋₃ alkenyl; C₂₋₃ alkynyl; cyclopropyl; phenyl, which phenyl is optionally substituted by a group selected from halo, methyl, methoxy; pyridyl; and thiophenyl;
when there is a single bond present between C2 and C3,
R² is [chemical structure]
where R^{16a} and R^{16b} are independently selected from H, F, C₁₋₄ saturated alkyl, C₂₋₃ alkenyl, which alkyl and alkenyl groups are optionally substituted by a group selected from C₁₋₄ alkyl amido and C₁₋₄ alkyl ester; or, when one of R^{16a} and R^{16b} is H, the other is selected from nitrile and a C₁₋₄ alkyl ester;
B. wherein, if D^{L} is of formula II,
R²² is of formula IIIa, formula IIIb or formula IIIc:
(a) [chemical structure]
where A is a C₅₋₇ aryl group, and either
(i) Q¹ is a single bond, and Q² is selected from a single bond and —Z—(CH₂)ₙ—, where Z is selected from a single bond, O, S and NH and n is from 1 to 3; or
(ii) Q¹ is —CH═CH—, and Q² is a single bond;
(b) [chemical structure]
where;
R^{C1}, R^{C2} and R^{C3} are independently selected from H and unsubstituted C₁₋₂ alkyl;
(c) [chemical structure]
where Q is selected from O—R^{L2′}, S—R^{L2′} and NR^{N}—R^{L2′}, and R^{N} is selected from H, methyl and ethyl
X is selected from the group comprising: O—R^{L2′}, S—R^{L2′}, CO₂—R^{L2′}, CO—R^{L2′}, NH—C(═O)—R^{L2′}, NHNH—R^{L2′}, CONHNH—R^{L2′}, [chemical structure]
NR^{N}R^{L2′}, wherein R^{N} is selected from the group comprising H an 1-4 alkyl;
R^{L2′} is a linker for connection to the antibody (Ab);
R¹⁰ and R¹¹ either together form a double bond between the nitrogen and carbon atoms to which they are bound or;
R¹⁰ is H and R¹¹ is selected from OH, OR^{A} and SO_{z}M;
R³⁰ and R³¹ either together form a double bond between the nitrogen and carbon atoms to which they are bound or;
R³¹ is H and R³¹ is selected from OH, OR^{A} and SO_{z}M.

51. The method of claim 50, wherein the DAA is a tumour-associated antigen (TAA) or pathogen-associated antigen (PAA).

52. The method of claim 50, wherein:
a) the DAA is administered as part of a vaccine composition; or
b) the DAA is administered as part of a vaccine composition, wherein the CD25-ADC is also part of the same vaccine composition.

53. The method of claim 50, wherein the anti-CD25-ADC has the chemical structure: [chemical structure]
wherein the Ab is an anti-CD25 antibody having a VH domain comprising a VH CDR1 with the amino acid sequence of SEQ ID NO.3, a VH CDR2 with the amino acid sequence of SEQ ID NO.4, and a VH CDR3 with the amino acid sequence of SEQ ID NO.5; and a VL domain comprising a VL CDR1 with the amino acid sequence of SEQ ID NO.6, a VL CDR2 with the amino acid sequence of SEQ ID NO.7, and a VL CDR3 with the amino acid sequence of SEQ ID NO.8;
and wherein the drug to antibody ratio (DAR) is between 1 and 8.

54. The method of claim 50, wherein the CD25-ADC is Camidanlumab Tesirine.

55. A method of inducing or enhancing an immune response in a subject, the method comprising the step of administering a CD25-ADC to the subject;
wherein the CD25-ADC is a conjugate of formula L—(D^{L})ₚ, where D^{L} is of formula I or II: [chemical structure]
wherein:
p is from 1 to 8; L is an antibody (Ab) which is an antibody that binds to CD25;
when there is a double bond present between C2′ and C3′, R¹² is selected from the group consisting of:
(ia) C₅₋₁₀ aryl group, optionally substituted by one or more substituents selected from the group comprising: halo, nitro, cyano, ether, carboxy, ester, C₁₋₇ alkyl, C₃₋₇ heterocyclyl and bis-oxy-C₁₋₃ alkylene;
(ib) C₁₋₅ saturated aliphatic alkyl;
(ic) C₃₋₆ saturated cycloalkyl;
(id) [chemical structure]
wherein each of R²¹, R²² and R²³ are independently selected from H, C₁₋₃ saturated alkyl, C₂₋₃ alkenyl, C₂₋₃ alkynyl and cyclopropyl, where the total number of carbon atoms in the R¹² group is no more than 5;
(ie) [chemical structure]
wherein one of R^{25a} and R^{25b} is H and the other is selected from: phenyl, which phenyl is optionally substituted by a group selected from halo, methyl, methoxy; pyridyl; and thiophenyl; and
(if) [chemical structure]
where R²⁴ is selected from: H; C₁₋₃ saturated alkyl; C₂₋₃ alkenyl; C₂₋₃ alkynyl; cyclopropyl; phenyl, which phenyl is optionally substituted by a group selected from halo, methyl, methoxy; pyridyl; and thiophenyl;
when there is a single bond present between C2′ and C3′,
R¹² is [chemical structure]
where R^{26a} and R^{26b} are independently selected from H, F, C₁₋₄ saturated alkyl, C₂₋₃ alkenyl, which alkyl and alkenyl groups are optionally substituted by a group selected from C₁₋₄ alkyl amido and C₁₋₄ alkyl ester; or, when one of R^{26a} and R^{26b} is H, the other is selected from nitrile and a C₁₋₄ alkyl ester;
R⁶ and R⁹ are independently selected from H, R, OH, OR, SH, SR, NH₂, NHR, NRR′, nitro, Me₃Sn and halo;
where R and R′ are independently selected from optionally substituted C₁₋₁₂ alkyl, C₃₋₂₀ heterocyclyl and C₅₋₂₀ aryl groups;
R⁷ is selected from H, R, OH, OR, SH, SR, NH₂, NHR, NHRR′, nitro, Me₃Sn and halo;
R″ is a C₃₋₁₂ alkylene group, which chain may be interrupted by one or more heteroatoms, e.g. O, S, NR^{N2} (where R^{N2} is H or C₁₋₄ alkyl), and/or aromatic rings, e.g. benzene or pyridine;
Y and Y′ are selected from O, S, or NH;
R^{6′}, R^{7′}, R^{9′} are selected from the same groups as R⁶, R⁷ and R⁹ respectively;
A. wherein, if D^{L} is of formula I,
R^{L1′} is a linker for connection to the antibody (Ab);
R^{11a} is selected from OH, OR^{A}, where R^{A} is C₁₋₄ alkyl, and SO_{z}M, where z is 2 or 3 and M is a monovalent pharmaceutically acceptable cation;
R²⁰ and R²¹ either together form a double bond between the nitrogen and carbon atoms to which they are bound or;
R²⁰ is selected from H and R^{C}, where R^{C} is a capping group;
R²¹ is selected from OH, OR^{A} and SO_{z}M;
when there is a double bond present between C2 and C3, R² is selected from the group consisting of:
(ia) C₅₋₁₀ aryl group, optionally substituted by one or more substituents selected from the group comprising: halo, nitro, cyano, ether, carboxy, ester, C₁₋₇ alkyl, C₃₋₇ heterocyclyl and bis-oxy-C₁₋₃ alkylene;
(ib) C₁₋₅ saturated aliphatic alkyl;
(ic) C₃₋₆ saturated cycloalkyl;
(id) [chemical structure]
wherein each of R¹¹, R¹² and R¹³ are independently selected from H, C₁₋₃ saturated alkyl, C₂₋₃ alkenyl, C₂₋₃ alkynyl and cyclopropyl, where the total number of carbon atoms in the R² group is no more than 5;
(ie) [chemical structure]
wherein one of R^{15a} and R^{15b} is H and the other is selected from: phenyl, which phenyl is optionally substituted by a group selected from halo, methyl, methoxy; pyridyl; and thiophenyl; and
(if) [chemical structure]
where R¹⁴ is selected from: H; C₁₋₃ saturated alkyl; C₂₋₃ alkenyl; C₂₋₃ alkynyl; cyclopropyl; phenyl, which phenyl is optionally substituted by a group selected from halo, methyl, methoxy; pyridyl; and thiophenyl;
when there is a single bond present between C2 and C3,
R² is [chemical structure]
where R^{16a} and R^{16b} are independently selected from H, F, C₁₋₄ saturated alkyl, C₂₋₃ alkenyl, which alkyl and alkenyl groups are optionally substituted by a group selected from C₁₋₄ alkyl amido and C₁₋₄ alkyl ester; or, when one of R^{16a} and R^{16b} is H, the other is selected from nitrile and a C₁₋₄ alkyl ester;
B. wherein, if D^{L} is of formula II,
R²² is of formula IIIa, formula IIIb or formula IIIc:
(a) [chemical structure]
where A is a C₅₋₇ aryl group, and either
(i) Q¹ is a single bond, and Q² is selected from a single bond and —Z—(CH₂)ₙ—, where Z is selected from a single bond, O, S and NH and n is from 1 to 3; or
(ii) Q¹ is —CH═CH—, and Q² is a single bond;
(b) [chemical structure]
where;
R^{C1}, R^{C2} and R^{C3} are independently selected from H and unsubstituted C₁₋₂ alkyl;
(c) [chemical structure]
where Q is selected from OR^{L2′}, S—R^{L2′} and NR^{N}—R^{L2′}, and R^{N} is selected from H, methyl and ethyl
X is selected from the group comprising: O—R^{L2′}, S—R^{L2′}, CO₂—R^{L2′}, CO—R^{L2′}, NH—C(═O)—R^{L2′}, NHNH—R^{L2′}, CONHNH—R^{L2′}, [chemical structure]
NR^{N}R^{L2′} wherein R^{N} is selected from the group comprising H and C₁₋₄ alkyl;
R^{L2′} is a linker for connection to the antibody (Ab);
R¹⁰ and R¹¹ either together form a double bond between the nitrogen and carbon atoms to which they are bound or;
R¹⁰ is H and R¹¹ is selected from OH, OR^{A} and SO_{z}M;
R³⁰ and R³¹ either together form a double bond between the nitrogen and carbon atoms to which they are bound or;
R³⁰ is H and R³¹ is selected from OH, OR^{A} and SO_{z}M.
